United States Patent Application Publication US 2026/0109938 A1 - sequence listing, part 12

SEQ ID NO: 6 - DNA, 3977505 bp, Escherichia coli (residues 1,988,754-3,977,505 of 3,977,505)
  source 1..3977505: mol_type = genomic DNA
gtctgggtgatttggggcgtgatcgttaatgcctggtttattccagaaattgccagccagttcttcaccatgggtctggtgattggcatcatcggcgttgttttccgccttaacggcatgacggttaataccatggctagttcctttaccgaaggggcgcgaatgatgatcgcccctgccctgctggtgggtttcgccaaagggattttgctgctggtcggtaatggtgaagcgggtgatgccagcgtgttaaataccatcctcaacagcattgccaatgccattagcggtctggacaacgcggtcgcggcctggtttatgttgctcttccaggcggtatttaatttcttcgtgacgtccggttctggtcaggcggcgttaaccatgccgttactggcaccgcttggcgatctggtcggtgttaaccgtcaggttaccgtgctggcgttccagtttggtgatggcttcagtcacatcatttacccaaccagtgcgagcttaatggcaacgctcggtgtgtgcagggtggacttccgtaactggctgaaggtgggcgcgaccctacttggactgctgtttattatgtccagcgtcgtagtgatcggcgctcagttgatgggctaccactaaaaatgttaagagccgcaattgcggctcttttttcattctgccgtttcagtctctacggcttcatttttggcattgcgcttcatccacaacgctagcgctttcaggctgtctggagtgaactcatcgcagcgtgcggtgatttcttccggcgtcagccagcaaacttcactgacttcatcttcctgtagtgcgaagggaccgtgagagacgcagctgaacaatgcgccccagacacggcaatttttatcttcgaaatagaactgcccgtgctcggcaaaggggacaccggcaatgcccaactcttcttccgcttcgcgacgcgcggattccagcagttgctcatcggcctggactacaccgcctgcggtcgcatctaacatgccgggtaaaaagtcttttgtctcggtacgacgctggaccagaattttgcccatgccatcatgcacgacgatgtaagttgcacgatgacgcagacactgtgcccgcatttgttcccggctggcttgtgcaatgacttcgttctcttcattgacaatatccacccattcagtacttgccaaacgacgctgttccattatcaggaaaccttctttttctggcgctcttacggcgcattttgagttgtgggtaaattacggattaatcgcgacctgcgcaatgatactttgatcattgagtgcgattacactaagtacgtcattatccagcatgccataactcgccggattaccgcctttcggaatactcacgctgccggggttgaagtggaaaatctccccccgctgttctgccactggcagatgggtatgaccgtacaccagcacatcgttctggtttaaagcaggcagattttccgggccaaaaagatgaccatgcgtcaaaaacagacgttgtttttccagtaatacctgttgccacggcgcggttatcgggaaatgcagcagcatttgatccacttcgctgtcgcagttgccgcgcacagcgataaccttatgtgccacttcattaagccgttcagcgactttggctggcgcgtaaccctccggtaaagcattacgcgggccgtgattcaacacgtcgccaaggatcaccagccactgggcaccgctttgggcaaacaactccagaacacgttccgtcgccggtaagctcccatgaatgtcgcttgcaaacatcagtttcatcactcactcctcgtcgaaaaaacgtaagctatgatactggattctgtcgttgctatcagccagattgcttcgcgctaagtgcaataaaacgctggacagacgctcgctgccactggaatgttgcataatccaccaggcgttctggcacctcatcgccatgtagtaccaggcggttaatcattagcgccagatcagtatcagcaatgcaccattcaccaaataaattcggctgacccagtactaacaaatgttctgccatcgcgaacagtttctctgcactggcttttccctcggccgttagtggcgcttttttcgcccccgcaaagacaacatccgtcggacgctcttcgcggatgggcatcagatcgctgcgcagccaggcctgaatctgtcgtgcacgcgcacgattttctaaatcaagcggataaatacgttcccaggtcggtgacgcaaatcgatcttccagatactccgcaatggcagaagattcactcaactcaaaatcatcgatttgtaataacggcacacggcgtgtctgaccgtaaccttgccacgtcggctgcaaatgttcaccgctgtcgaggtcgatggtcttgatatgaaagctcaggcctttttcctgcaacgccacccaggcggataacacataaggggagaaaaagtgggcatcactccaaagcgtgatagcgggtttactcattatgtcctcggcaataaagggggctggctatcaaactatagagcctttttgtcactgtcacgtgacgaatactcacgtaagtcgccgcgctttctatacttgtggtgttcagatgattaaacaaccggagctgcaatgatcgatctctatttcgccccgacacccaatggtcacaaaattacgctgtttctcgaagaagcagagctggattatcgcttgattaaggtagacctggggaaaggcggtcagtttcgtccggaatttttgcgcattagccccaacaacaaaattccggcaattgttgatcattctcctgccgatggcggcgaaccgctaagcctctttgagtctggtgccattttgttgtatctggctgagaaaacaggactctttttgagtcatgaaacgcgtgagcgcgccgccacattacagtggttattctggcaggtaggcggactggggccgatgcttgggcaaaatcatcattttaatcacgcagccccccaaaccattccttacgctattgaacgttatcaggttgaaactcagcgtctttaccatgtactgaacaagcggctggaaaacagcccctggctgggaggcgagaactacagcattgcggatattgcctgctggccgtgggttaatgcctggactcgccagcgaattgacctagcaatgtatccggcagtcaagaactggcatgagcggatccgtagccgccctgccaccgggcaggcactgctaaaagcacaactcggtgatgagcgtagcgatagttaacagaaacaggttctcgtgtattatttcatcctaagtaaaacaacggagaacctgcaatggcacaacctgccgctattattcgtataaagaaccttcgtttgcgtacgtttatcggaattaaggaagaagaaattaacaaccgtcaggatattgttatcaatgtgacgatccactaccccgccgataaagcgcgcactagcgaagatatcaacgatgcgctgaattatcgcaccgtaacgaaaaacattattcagcatgtagagaataaccgtttctctttgctggaaaaattaactcaggatgtgctcgatatcgcacgtgaacatcactgggtgacgtatgctgaagtggagatcgataaactgcacgcgctgcgctacgccgatagcgtatccatgaccttaagctggcagcgttaatcgccatatcgggaggctgcatgaacatagtgatcaccggagggacaggattaattggtcgccatttgattccgcgtttgctggagctgggccatcaaattacggtagtgacgcgtaacccgcagaaagccagttccgttctcggccctcgggtgacactatggcaagggcttgccgatcaaagcaacctcaacggcgttgatgcggtaatcaacctggccggagaaccgattgctgataaacgctggactcacgagcaaaaagagcgtctctgccaaagccgctggaatatcacgcaaaaactggtcgatttgattaatgccagcgacacgccaccgagcgtactcatttccggcagcgcaacgggctattatggtgacttaggtgaagtggtggttaccgaagaggaaccgccgcataacgaatttacccataaactctgcgctcgctgggaagaaattgcctgccgggcgcaaagtgacaaaacgcgagtgtgcctgctgcgtaccggtgtagtgctggcaccggatggcggtattctcggtaaaatgctgccgccgtttcgtcttggcctgggcgggccgattggctctggtcggcagtatctggcctggattcatattgatgatatggtcaacggtattctctggctgctggataacgagctgcgcgggccatttaatatggttagcccctacccggtacgcaatgaacaatttgcccatgcgctcggtcatgcgctgcatcgcccggccattttgcgcgtccccgcgaccgccattcgactgttaatgggcgaatctagtgtactggtattaggtggacaacgcgcgctgcctaaacggctggaagaagcgggttttgcgtttcgctggtacgatttagaagaggcgctggcggatgtcgttcgctgatgtggtttacagcaaacatccgccagttaactcccggtgttacaggattagtggctttgcgcgataagatcgtctggactaagtcgggtcaccatcataactaactctctgtctaaacctctatccagcatctcctgagcaatacgcagggcttcttcgtgtttgccctgcattgcgccttcttcacgtaatctgtcagcaatggtcatcagtttctccttttcttgtggtgcgcgttccgctatctcaccaataaatgcacgaaaacgctgggcatcccctgtttgtaatacgtaattaaacagggcttttagctgtctgtcattagtgttccctgtaactagcaggctaacaatttggtcgactaatcccaacagatcgcgctgacgaatatgtttctgaattaactccaacagcgccattttgcggtgttgcataatctcgtcatccggcaccacggtaatatccaccaacggaaaagcgctactatatattttgcgggctatagcaggctcggcaaattcatcaagccagcagagactataaggataaggacttctgcaaccatgataaaacagcatcgggagcaccaatggaagctctttatagcccgcatcaagatggttttgcattgccgcaatggaataacgcatcatgcgaaaagccattaattcttccggcttactttggtgctctatcactacataaatataacccactccctcctgcgttttcacagaccacaagaggtcggaataatattgccgcaggtcttcatcaataaaactgtttggttccagtttaagcgtcgttaaatcacacagtttgcgcagcggcgcgggaagatgaatatcaataaaatcccgcgcggtgtctggatggcgtaaaaaagatttaaataccgcatcatgcggcgtggaagttgtgcttattgtcatggcgttccgtcacccctcaaatttaagatgacgcgacaataaccacgattaacacccaatgcagcaggcagtttttatctttggacagcgaattcagaagtatttttagcggactgtaacttttacatttcagcggaagctgactcgcaaattccccatgaaaatactccggcagcgttagccaccggagaggaaattatttcaggcttcccttaaggaaccgttgcagacgagggctttgcgggttgccaaataactgctccggcgcgccctcttcttctattttcccctgatggaggaaaatgacatgagtagaaacatggcgagcaaagcccatttcgtgagtcactaccaccatggttttcccctcttctgccagttgctgcataatacgcaacacttcgcctaccagttcaggatcgagcgcgctggtaggttcatcaaacagtaaaacttccggttccatcgccagcgcccgcgcgatagaaacacgctgttgctgaccgccggaaagatgcaccggatatttcccctgcgcacgttcgtctatcccgacttttgccagatacttcaccgcccgctcgcgcgcttcctgcttgctcaggcccaacacctgaatcggcgcttccatgacgttttccagcaccgtcatatggctccagagattgaagtgctggaataccatcgtcaggcgtgtgcgcagtaagcgcagttgatttttatcggcgactttgagttgaccgtctttgtcgcgcaccagattgatcgtctggccattgaccacgatgctcccttcactcggtttttcgaggaagttaatgcagcgcagaaaggtacttttcccgcttccgctgcttccgatgatgcttattacatctccggcattcgcttgcagacttacccctttcagcacttcatgttcgccgtagcgtttgtgcaaatcgataacgtttaatttattctcggacatcgtattctcagtgcgtactagaaggtttcacatgctgcaaccagcgtttttccgctctgcgaaagaggctgatcaggacataagagatgattaaatagagcaccgcggcaatgccgaaggcggtaaaaggttgatacgtggcggcgttaatatcgcgggctattttcagcagatccggcaccgtggcagtaaatgccaacgcagtagagtgcagcatcaggatcacttcgttgctgtatgccggtaacgcaatacgcagcgcagaaggcaaaataatgcagcgatacattttaaaagtgctgaagccataggctctggcggcttcaatttccccatgcggaacgctacggattgccccagcaaaaatctcggtagtgtaagcgcaggtgttaagcgtcagcgccagcacggtacagttcaggccactgcggaagaaagcgttaaggaattcggttcccttaacaatctcaagcgtgtacatgccggaatagaacaccagcaactgaacatacagcggcgtaccgcgaaaaatataggtaaataaccagattggaaactggatgtatttattactggagacacgaccaatcgccagaaacagcgccaggactccgcctatcactacgctcaaaataagcagccacagagtgatcgccacaccagtaaagcgataaccgtcggtccacagcagcggtttccagtattcatgtaagatttcgatcacaggtcagccctcttcacacccacggagtagcggcgctcaaggaacagcagcacaccattggaaacagtggtgaaaaccaggtaaatcacgccacagacgatggcgaaatagaacggttcccaggtacttttgcctgccagttgggtggctttgaccacatcttccaggccgagtaagctaaccagtgcggtagatttgaggatcacctgccagttgttgccaatgcctggcagggcgtaacgcatcatgctcggaaacatgatccgccgaaacacttgcccacgagtaaaaccgaacgccgtcgccgcctctatatgtcctttcggcactgccataaaagcaccacggaacgtttcggtaaaataagcaccgtagataaaaccgagagtgataataccagcgaccatcggatcgatatcaatctgcccgacgcccatcgcctccgtcaccgtgtttagcgcaatctgcaaaccgtagaaaatcagcagcatcaacactaagtccggcacgccacgaatcagcgtggtgtacccttcgaaaatcagcccgctaagccgattttggctgagcttaccgccagcgccaattaaaccgatgattacagcgagcactacagagctgatagccagctccagcgtgacgagcgcaccctgtaaaataacaccactaaacccatacaacatgctgcctgtcctgtcgtgtgtggtgaattaccgcctcttgtctccctccggttacccgaagggagcgggctttctttcaccgatggcgattagccaccataaacatcaaaatcgaagtactttttcgctaatttctcgtaagtaccgtcagcgcgcatttcggcaaaggctttgttcagtgcttcgcgcagttcgttatcttctttacgcaggcccatgccggtccctacgccaaacagtttttcatctttaacagacgggccaccgaatttgtaatctttaccgacaggttgtttgaggaaaccttcgctggcagcgacctcatcctggaacgcggcatcaatacgtccggcagtcaggtcagaataaatgttgtcctgcccctgatagctgacgatttcaatgccttttggtgcccaatgttcattaccgaacgtctcctgggtggtgccctgcaatacgcctacccgtttgcctttcaggctctcgactgtcggctgaatgtcagaatttttcgccaccaccaaacgagaatcggcagcgtacagtttgtcggtgaaggctatttcttgctgacgtttttccgtaatggaaaggctactcatgatggcgtcaatcttcttcgcttttaaggacgggattaacgcatccagcggattttcgacaaacgtacattgcgtattgatgcgtttgcataattcctttgccagatcgatatcgaagccaaccagttcgccttgactatttttactttcaaatggcgcataggtcgggtcggtaccgatgcggatgttttgcggaatcgcagcaaacgccgcagttgcgctggagaaggccagaaccagagagaggcttagcaccagttttttcataatgtcctcaactgacagtctttttatagggaatatttacaggtttgttacacttatcgtgccataaaattgaccatcaaggcaaaatatcccgccccgttagacgtattatttttcattaaaaatgcttaagtatgcatttcaatgcaccacgatagtgcaacaaacctggcgtgcaccatgatgatcattccatcaggtacagcttcccagcgacgtatcagtcaccgtagacattaaagtcgaaatactttttcgccatcttgtcgtaggtgccgtcctgacgcagctcgccaagcgccttattgaaggcagccgtcagttcagcatcatctttacgtagccctacaccggtgccatcaccgaagtattttttgtcttttacactactgccagcaaaggcgaaatctttaccagcaggttgcttgaggaatccttcgctggcagcaacttcatcttgtaacgcagcatccagacgtcctgcagccagatcggaatagaccaaatcctggttggcataggccaccacatccacgcctttactacgccaggtctcgttagcgtaagcttcctgggtacttccctgcagcacaccaacatgtttacctttcagactatccagcgttggctgaatcggactacctttggccgcaatcaaacgagaatctgcggcgtacagcttgtcggagaaggcaatctcctgctgacgtttatcggtaatggaaaggctgctaataatagcgtcgatttttttcgctttcagactggggatcagcgcgtcaaagtcactggcaacccaggtacatttcacctgcatccgtttgcacatctcgttaccgagatcgatatcaaagccaacaaaatcacctttagcatctttgctactgaacggtgcgtaggtggtatcggttccgatacgtaccgtctccggtagcgccgcatagctggaagccgctgtggagagaccgactaacaaagacagagcgagaatgctcttcttcatacataaccctcaagtgaaaatggcttttttatgttgtgtattgtgttgtgtgtttgcaggctctttcatgcaggtcttatgccatcttgacgacaacagtaacattcaacgttaaatatgttaataagacgttgcattattgtcctgaagttgaagatagcaggtatagcggttgaatcgcagcgtttcgattgaatggcagaaacaaaatgtcgaggatttgatcgcggttgcaaaattgccctgaaacagggcaacagcggagttatgcgccctgccagcgggcaaagagatcttcaggaagggttatcgcaaactggtcaagaacacgattaaccgtctgatttatcacatcatcaagggattgcgggcgatgataaaacgccggaacgggaggcataatcaccgcaccgatttctgccgcctgagtcattaaacgcagatggcctaagtgcaatggtgtttcacgcacgcagagcaccaacgggcgacgctctttcagcaccacatctgccgcacgggtcagtaagccatcagtatagctatggacaatgccggaaagggttttgatactacagggtaaaatcaccatccccagcgtctggaaagaaccggaagagatgctggcggcaatatcgcgcgcatcgtgcgtgacatcggctaatgcctgcacttcgcgcagagaaaaatccgtttcgagggataaggtctggcgcgctgcctggctcatcaccagatgcgtttcgatatctgtgacatcgcgcagaacctgtaataagcgcacgccataaatcgcgccgctggcaccgctgatgcctacaatgagtcgtttcataaatagttgccctgtcagacttgcaggcagactttgcaggatttcggcgggagttgcaagtcagggtgccagaccggcaccctcagcgaaggcatcatccttcgttatgcatttcgagattttccacttcgttctgacgttgcactgctttggcgtcatcattacgtaacgtatcgaggaaatcgaggtagccctgatcaacatctttggtgacgtagacgccgttgaacacgctgcattcaaactgctggatatccggattttcagcgcgaacggcgtcgatcagatcgttcagatcctggaaaatcaacccgtcagcaccgatgatctggcgaatttcatcaacttcgcgaccgtgagcgatcagttccgtggcgctcggcatatcaataccataaacgttcgggaagcgaatttccggtgccgcagaagcgaggtacactttcttcgctccggcttcgcgtgccatctcgataatctgctcagaagtggtgccacggacgatggagtcgtcgaccagcaggacgtttttatcgcggaactcggcgcggttggcattcagtttacggcgcacggacttacgacgcagctgctggcccggcatgataaaggtgcggccaacatagcggtttttaacgaagccctggcggtacggtttgcccagaatacgagcaatttccagcgcgatatcacagctggtttctgggatcgggatcaccacgtcgatatccagatcttcccattcgcgggcaattttctcgcccagtttcgtgcccatattcacacgcgcgctgtaaacggaaattttgtcgataaagctgtccgggcgggcaaagtatacatactcaaacaggcacggattgctgaccggattgtcagcacattgacgggtaaacaactgcccttcttcagtgatgtaaatcgcttcgcccggcgcgacgtcacgcaggaaatcaaagcccagcgtatcgagcgctacgctttcggaagcgaccatatattctgtacggttctcgtcaatatcacgttttcccagtaccagcggacgaatcccgtttggatcgcggaaagcaaccataccgtggccgataatcatcgccacacaggcatacgcgccgcggattaagcggtttgtggcagcaatggcagcgaaaatattgtcggcttccagcgggtagtggcggaagttgtccagctcgctggcgaagatattaagcagaatttcgctgtcggaagtggtgttgatgtggcggcgtttttcttcaaacagttttttacgcaactcgtgagcgttggtcagattgccgttgtgggcaagcgtaatgccatacggggagttaacgtaaaacggctgcgcttcagaggcgctggagctgccagccgtggggtaacgcacatgaccaatgcccatattgccctgcaaacgctgcatatggcgagcttcaaatacatcgctcaccagcccgttcgctttacgcaaacggaagcagttattggcatctatggtgatgatgccggcggcatcctgaccgcgatgctgaagcaccgttaaggcatcataaatgctctggttaaccggcataacaccggcgataccgacaataccgcacatacgtctttttcctcgttaagccacatctcagagcacttacgctctgggcaagaaactactgctgctttgcagataatcaaaaaaacatctgatgataaaactgaattgcgggatcagctgacttttgctccagtcttcgcttttgctcaccccggtaaaggagtcgagaaagaagagaatggcagcaacaatcaacacaccgcgcaacgcaccgaaacagacgcccagcacccgatcggtgccactcaaccccgttttctccaccaactggcctatcacgaagttcacgatagcaccaacgatcagggtagcgataaacagtaccgcgatggcaatcccatttcgaaccagttcgtcttcaaagcccgtaaaccagacactcaggtaagtgtagtaatgactggcaacaaagaaagcacaaccccatgtcaccaggcttaacgcttcacgaacaaagccgcggatcaggctaaccagagaggaaaaagcaatcaccgcgattatggcgtaatcaatccagaccatatgtgtcccacgattttacgccctgtcatcctgttcggggcgcattctaacagaaaaagaaaacgtttgcgtagggatttccttcccgcgcatcaataaaaatggcgctgaaaaaatattcaacgccatcgactttttatgcctttgcggcatcgggcaatgcgtgtcggatgcggcgtaaacgccttatccgacctacggttctacccctgcgtaggcctgataagacgcgccagcgtcgcatcaggcaagaccgtattaattcggcgtatagcccattaccacgccacttaagccagaaagttgcttcaactcacccaggctacctttcagcttatctttgctggcatccggcccaaccagaatacgggtaattttaccctgcactggcgtggatgggctcgtataaacccgataaccggcaccgcgcagcttaccgacaatctcattcactttatcggcatttttcagcgcacccagttgcacaacataggctttacccgtcggtgcagctttttcttccacgaccggcttcggttctggcttcggcgcaggtggtgcttcaacctttggtttaggcggctccaccggtttcggcttcggtggggcgaccggtgcaggttccggttcaaactcggtgttattggctgcaatagtggccggatcgaggctcggtgctgcggcatcacctgcccgcacctcttccgctgcgccttccggcggctgcgtcggtaacgcctgggtggcggctggcatcatatcaggctcatcacgatcgcccgctttcggcaccagcgggatagccgcgaactcatcctgataatgttttttctgcccgtccagcagccctggaagtacaatcacccccagcgccaccagcacgatcgtgcccactaaccgattctgaaacttacttgccaccgcttctcctcgcgtcaatcacttccatgacatgtgcgaccgtgtggaaagaaccacacaccagcacggtgtcttccgctttagcgtccgccattgcggcatcccatgcctgcgcaacgctatcaaaacttttgccgttacccaaatgctcaagcagttgttctgccgtggcaccgcgcggcccttccagtggcgcacaataccagtcatcaaccacgcttttcaaccaggccagagttccggcaatatctttatcatgtagcataccgataaccgccagcacgcgcccgtttttcggtagcgctttcatacgcccggtgagatattccgccgcatgtggattatgcgcgacatcaaaaataacgcgtgggctctcgctcacaatctggaaacgtcccggcaaaattgcgctggcaatcccgtcgcgaatggcattttcactgacttccagcccgctggcacgcagtgccgccagcgctgttgcggcattcggttgcgggacaagcggcaacggcagattttccagcgtgccgtgagcatcgctaaacgcccagtcatgatcggtgacggaatagttccactcaacgccccgacgttgtaacagtgcacctttttcctgcgccacatcagcaatggtagaaggcatttccggctcaccgacaattgccggtttttcgctgcggaagatgcctgctttctcgcgaccaatactttcgcgatctggacccagccagtcggtatgatccagcgcaatactggttactaccgcgacatcggcgtcgacaatattggttgcgtccagacgaccgcccagccctacttccagaatcaccacgtcaagttgtgcctgcttgaacagccacaacgcgctcagcgtaccgtactcgaaataggtcagggaaatatcaccgcgtgcgctttcaatctccgcaaaagaggcggtgtgggcgctttccggcaattcctggccctgcacacgtacgcgctcggtataacgcaccagatgagggctactgtagacgcccactttgtaccctgccgccatcagaatgctctccagcgtacggcaggtggtgcctttgccattcgtacccgcaacggtaaacacaaatggcgctggtttcaggacgccaagacgcgccgcgaccaggctcacgcgctcaaggccgagatcgatagttttactgtgcaggttttccagataagaaagccagctagccagagggctcgcggcttgaggagtgcgtttgataatcatggtatccgctgattcgttacggtgagaatagcaaaagggcagagccagtggccctgcccttatcagttatcaggcctcaggttcctgatccggtaccgggggtaccactacgccttcacgcggcgcttcaggattcggcgctggcagattcatcaacttcgccagaatgctcgccagtttcaggcgcatttccggacgacggacgatcatgtcgatcgcgcctttctcgatcaggaattcactgcgctggaatccaggcggcagtttttcgcgaacggtctgttcgataacacgcggaccggcaaagccgattaacgctttcggttcagcgatgttgagatcgcccagcatggcgaaacttgcagaaacaccgcccatcgtcgggtcggtcagcacggagatgtacggcaagccgcgctcctgcatttttgccagtgccgcagaggttttcgccatctgcatcaggctcatcagtgcttcctgcatacgtgcgccaccagaggcggagaagcagatcagcgggcagttatcttccagcgcctgctcaacggcacgcacgaaacgtgcacccacaacagaccccatactaccgcccataaaggcgaactcgaatgccgcagcgacaaccggcattccatacagagtgcctttcatcaccaccagcgcatctttttcgccggtttctttctgcgcagatgccagacggtctttatacttcttggagtcacgaaacttcagcacatctttcggctcaagctcgctacccagctccacaaggcttccttcatctaacaggctatgcaggcgattacgcgctgtcatacgcatgtgatggtcacacttcggacagacctcaagattacgttccagctcagcgcggtataaaacctgaccgcagctatcacacttagtccacaccccttcaggaatgctcgccttgcgggtgggagtaatgttgcttttaattcgttcaatccagctcattagggacctttctgtctgaacctggttcgatgccagttttatctttggggacgcataatgccatttttgcccccaacagaccatgaatgttgcacattaaaacataacagcccgaaactttggataaaaaagtggtcgaaccgcggagttactttttattttgcggcgcgtgccgcagcgcgtttgtgacggattatttcgatgacgcccggcaaaatagaaaccacaataatcccgacgatcagcagcttaaggttatcctgaaccatcgggattgtaccgaagaaatagcctgcgtaggtaaaaagcagtacccacaacagtgcgccgatcacgttataagcggcgaaatgacggtagctcatgtggcccattcccgcaacaaacggggcgaacgttctgacgatcggcacaaaacgggcgagaataatcgttttgccgccatgtttctcataaaactgatgggttttgtcgagataactgcgacggaaaattttgctattgggattactgaacaacttttcaccgaacaaccgcccgatagtgtaattgaccgcgtcacccacaatcgcggcgatcagcatcagcaccaccatcatatggacgttgagatcgttggtttccagacttgccaacgctccggcaacaaacagcaaactatcacccggtaaaaacggcgttaccaccagaccggtttcacagaacaaaattaagaacaaaatggcataaacccagacgccgtactccgcgaccagctctgccagatgcacgtcaatgtgcaggataaaatcgatgaggaaataaatcaggtccatatttgcctatgccttgtactcgtcatctttcaggctgtaactacgttggctacagcctgaaatgttccgagcattattctcgttagtccgccagaaatagcgggcccattggcggttttggaagatcataccggtcagggtaatccaccgcgaccagatacagcccttccgcttttgccgttgctgccgccagcgttctgtcctttgccgccagcaactctgctatccagctctccggctggttgtgggcaccgacttccatcaggctgccgacaatattcctgaccatatgatgtacaaaagcattcgctttaatatctaccaccacataaggaccgtgacgcgtgacattaatatgcataacgttgcgccacggggttcgggactggcactgcaccgcacggaagctggtgaaatcattctcgcccagcaagcattgcgcagcccgatgcatccgttcagcgtccagcggttcgtaaaaatgggttacccctttactcagtaccgccgggcgcagccgatgattgtagatgatgtagcgataacggcgagccgtggcgctaaatcgggcatgaaaatcatcaggtacagttttaacccaacgcacagcgatgtcaccaggtaaattcgcatttacgcccaaggtccacgccgcgtctttgcgcagcgcggttgtttcgaaatgcacaacctgcccggtaccgtgtacccctgcgtcagtacgcccggcgcagaagacggtgatgggttcgttcgccacctgggagagcgccttttccagcttctcctgcacactgcggacttcgttctgccgttgccagccgtaatacttactgccgtcgtactcaatgcccagcgcaattttataaactggcggttgttgctggtcggacattagtacagatactcctgcaccagtttctcggcgatttttactgccatcagcgcgccgccaaagcgaacgttatcggccacgctccagaactggacttgctccggcataccgtagtcattacgcacgcagccaacagaaagatgcggcgtaccgctagcatcacctacctgagttgggaattcgttctcttcagagagcacaatatcttcgccttgaacaaacgcatcacgcgcttcttctgctgccagtggacgcagagcttcaaagttgaccatctgggcatgaccgtagaataccggtgcctggacgacgctagcgctaatcatcagcccttcgtcctgcaggattttgcgtacttcgtcaacgatacgacgttcttcacgcacgctaccttcgctatccggcagtaacggcagcatgttgaacgccagctgacgcccgaagaaatcttcttcgtcaatcggaatgccgttgagcaatttcgcactctgccccgctaacgcatcgaccgcttttttgccctgggcggaggcactaatcaggctggtaacgctgatacgacttaaaccgccctgatcgattaacggtttcagtgccgccagcagctggctggtcagactgtctggtacggcgatgacattccggttccggtaatctgtcagtacaaacgggtttacttccggcaccaccagcggtacgtcgggttcgagagcaaacaatccactgctgtcgatcaccaggcaaccactgttggtcgcttcttcaacccaggcagcggtagcttctttgcctgcgacaaaaaatgccagctgcgcctgcgtccagtcgaattcagcggcatcctgcacggtgattgtcttaccaccaaagcgcagttgttcgcctgcgctttcgttacgtgccagtgcataaatttccccaaccgggaactgacgttcagccagcgtttcaagcagggcttcgcccacagcgccagttgcgcccaggacggcaatgttccagccttcagacatggtggtttactccagaaatagcaaagctccctgccaatgttacagcagagagcatgaagaagagattaacgtgccggatgatgaacggcgttaaaacccagtttacacagcaaacttgccgcactggcgtcatcacaaattacatacagagaactccattcacggcgctcaagatagtttttgcgcagtttatcgaactcacccggtatcccggcgactttacgcagcggtgcgtcatcgcggcgcacatcatacaccaaatgcaccagccttttcagcgtcggttgatcgagcgggccatgcagcgtaatgcgaccaaactctggcgcaggcagtaatgtatccagcgcaacgtgctgttcatgcccaataaacttgctataagcttcaaacacttgcgtagtaccgcgtgctttaccttccagggtatagcctgcgatatggctcgtgccgatatccacttttttcagcagctcgacgttgagttccggttcgccttcccagacatccagcactacgcttaacttctggccttcattcaggcaggtcagcaacgcagtattatcgacgactgcgccacggcaggcgttaatcagaatcgctccgggcttcaggctacggatcagtttttcatccgccagatgtagcgttttgtacggaccatctttaaagagtggcgtatggaaagtcagaatatccgcgcgctggactaactcatccaggctgcggaaatcaccctcatccccacggtcggcgcgaggcggatcgcaaagtaaggttttaatccctaacgcttccagtcgcgcctgcaatcgacgtccaacgttaccaacgcccacgatccccaccgtacggtcgtacagactaaatccatcgcgttcggcaagcatcagcagggaggagaaaacatattccaccaccgcaatcgcattacagccaggtgcagcggaaaaaccaattcccgcctgcttcaaccatgcttcatcgacatggtcggtccccgcagtggcagtgccaacaaatttaatgggttttcctgccagcaaagattcattcactttcgtgacgctacgcaccatcagcgcatccgcgtctgccagttgagcgacggggattggacgcccgggaaccgcggtcacctcacccaaacggctaaataagtcgcgggcataaggcatattttcatcaacaaggattttcacgtttgtgttacctgtatgagacgagagttaaccggacaagtgtgccataatctcgcggccaggcatacttgcgaagatttcaggtataaggatacgtaatgatacaacctatttccggccctcctcctgggcaaccaccaggtcagggagataatctgccgtctggcacgggcaatcagcctttatccagtcagcaacgtactagcctggaaagcttaatgacgaaagtgaccagtctgacgcaacagcaaagagcagaactgtgggcgggtatcaggcacgatattggtctgagcggagatagtccgctgcttagccgtcacttccctgccgctgagcataatctggcgcaacgtctgctggccgcgcaaaaaagccattctgcccgccagcttttagcgcaattaggggagtatttacgtctggggaataatcgtcaggcggtcacggattatatccgtcataactttggtcagacgccgctgaatcagctcagtccggagcaattaaaaaccattctcaccctgttgcaggaagggaagatggttattccgcaaccacagcagcgcgaggcgaccgaccgtcctttattaccggcggagcacaatgcgctaaaacagctggtgaccaaacttgcggcggcaacgggggaacccagcaaacagatctggcaaagcatgctggaactttccggggtgaaagatggcgagttaattccagcgaaactgtttaaccatctggtgacctggctacaggcgcgtcagacgctaagccagcaaaatacgccgacgctggaaagtctacagatgacgctaaaacaacctttagatgccagtgaactggcggcgttaagcgcatatatccagcaaaaatatggtctttctgcgcaaagtagcctttcttctgcccaggccgaggatattcttaatcagctttatcaacggcgggttaaagggattgatccgcgtgttatgcaaccgctgcttaatccttttccaccgatgatggacacgttgcaaaatatggcaacgcgtcccgcgctgtggatactgttagtcgcgattatcctgatgctggtctggctggttcgttaaccccgacgaaaactcagtatcgtgacaataatacccagcaccgcagagatcgccccggcaagaaatacgctagagtaaccaaacgtggtcgccagcattcccgccagcggcccggagacgccgagggcgatatcctgaaacgcggcgtaaccgcccagtgcggtgccgcgaacttgactggggacgcgtttaaccacctccacgcccagcgcaggaaagataaggctacatccggctccggttaacgccgcgcccgctaatgcgacccatgcacctggggcttgccagagcagcaacaagcccaccgtttctacaagcagagagacaatcgccactttcacgccgccaaaacggtccggcatccagccaaacatgacgcgcatcacgacaaatgcgccgccaaacgcggtaagagtaaagcccgccatcgcccatcctttgctggcaaagtagaggctaacgaaagtcccgataacagcaaaaccaacgccttgtagtgccagacctaaccctggtttccagataagcccgacaacgctccacaggcttggacgttctcccgccagggccggtactttgcgcactgtgccgttacaggcccacgccagtacgggtaataccattgtggtgatcgccagtgcggcaaaaccgtaatggctatgaatcaacaggccaagcggagcaccaacagcgagggcaccgtaaatcgccattccgttccaactcatcactttgccagagtgttttggccctacgatgcctagtccccaggtcagagcgcctgtcagtaactggctttcaccaaagccaagaatcaaacgcccgacgaccaacagagcaaatttgaacggtgcggagacaggcaaaatcgccgccagcagcaacgcgccgccagccagaccacaagctaacattccctgaagcgcgctacgttttgcaccatattgatcggccagtcgcccggcgtaaccacgcgtcagcaccgtagccagaaactgaatcccgacggcaatgccgaccatggtattgccatagcccagttcatgatgaacaaacagcgggataaccggcaacggcaaccctacggtcatgtaggtgagaaaaaccgcaaaagcgatgcggaagaggctaaaattggcagaagatcgtgtttcggtttggcttacagcagtcatgcattactccagaatgcagcgcaaggcgaggagtatccccgtctcatctctctggtttcagggttacggtgcgttggcaggatttaacgcgtacgtcttttcagaaggaaatcgacaaagcgggaagtttgcctggaactggcggcgattgtcaatgatgtgaaaaagggaaccatcaggttcccttttgcgttagtgccggaggccgcattggcgcgtaacgtcggatgcgacgctggcgcgtctactccgacctactgcgaattaatctttcagcttgcgcattaccagcgtggcgttggtgccgccgaagccgaagctgttagacataacggtggtcagttcgcgatcggtcgtttcggtcacgatgttcagacccgcagcctgctcgtccagctcttcaatgttgatgctcggggcgataaagccgtgttccagcatcagcagagagtagatagcttcctgtacgccagcagcgcccagagagtgaccggtcatggctttggttgcagaaatcgccgggctcttatcgccgaacacttcacggatagctgccagctctttcacgtcgccaaccggagtgctagtaccgtgggagttcaggtaatcgattggggtatcaacgccatgcatcgccatcttcatgcagcgtactgcgccttcgccagacggagcaaccatgtctgcaccatcagaggttgcgccgtagccaacgatttcagcatagatgtgagcaccacgcgccagcgcgtgttccagctcttcaaccactaccataccgccgccgccagcgataacgaaaccgtcacggtgagcgtcgtaagtacgggaggctttttccggggtgtcgttgtatttagtagacagcgcacccattgcgtcgaattcgcaagccatttcccagcacagctcttcgccgccgccagcaaacacgatgtcctgtttgcccagttggatctgctctactgcgttaccgatacagtgtgcggaagtcgcacacgcggagctgatggagtagttaacgccatgaattttaaacggggtggcgaggcaggcagaaacgccggatgccatcgctttggtgaccacatacgggccaaccgctttcaggccgcgcgggccgcgcattgcgtcagcgccgaacacctggaaacgcggggagccgccgccggaacctgcaatcaggccaacgcgcgggttattctggtaagcttccggagagaggcccgcatcagcgattgcctgctccatagaaaggaatgcataaatggatgcgtcgctcataaagcgcacaactttgcggtcaatgaggccagtggtatccagttttacgttgccccagacgtggctacgcatgccggaatccttcagctcctgagagaaagtgatcccactacgtccttcacgcagagatgccaggacttcctgctggttattaccgatgctggaaacaatgcccaggccagtaatcactgcacgtttcattcaatacctctgtaagtcgcacatagagtaagtttcgaatgcacaatagcgtacacttgtacgccgaacaagtccgatcagccatttaatagagaaatttgcgcagccttacacacatcgctaagatcgagccaccgcctgtaagacgagtaacttacgtgaaacactactccatacaacctgccaacctcgaatttaatgctgagggtacacctgtttcccgagattttgacgatgtctatttttccaacgataacgggctggaagagacgcgttatgtttttctgggaggcaaccaattagaggtacgctttcctgagcatccacatcctctgtttgtggtagcagagagcggcttcggcaccggattaaacttcctgacgctatggcaggcatttgatcagtttcgcgaagcgcatccgcaagcgcaattacaacgcttacatttcattagttttgagaaatttcccctcacccgtgcggatttagccttagcgcatcaacactggccggaactggctccgtgggcagaacaacttcaggcgcagtggccaatgcccttgcccggttgccatcgtttattgctcgatgaaggccgcgtgacgctggatttatggtttggcgatattaacgaactgaccagccaactggacgatagcctaaatcaaaaagtagatgcctggtttctggacggctttgcgccagcgaaaaacccggatatgtggacgcaaaatctgtttaacgccatggcaaggttggcgcgtccgggcggcacgctggcgacatttacgtctgccggttttgtccgccgcggtttgcaggacgccggattcacgatgcaaaaacgtaagggctttgggcgcaaacgggaaatgctttgcggggtgatggaacagacattaccgctcccctgctccgcgccgtggtttaaccgcacgggcagcagcaaacgggaagcggcgattatcggcggtggtattgccagcgcgttgttgagcctggcgctattacggcgcggctggcaggtaacgctttattgcgcggatgaggcccccgcactgggtgcttccggcaatcgccagggggcgctgtatccgttattaagcaaacacgatgaggcgctaaaccgctttttctctaatgcgtttacttttgctcgtcggttttacgaccaattacccgttaaatttgatcatgactggtgcggcgtcacgcagttaggctgggatgagaaaagccagcataaaatcgcacagatgttgagtatggatttacccgcagaactggctgtagccgttgaggcaaatgcggttgaacaaattacgggcgttgcgacaaattgcagcggcattacttatccgcaaggtggttggctgtgcccagcagaactgacccgtaatgtgctggaactggcgcaacagcagggtttgcagatttattatcaatatcagttacagaatttatcccgtaaggatgactgttggttgttgaattttgcaggagatcagcaagcaacacacagcgtagtggtactggcgaacgggcatcaaatcagccgattcagccaaacgagcactctcccggtgtatagcgttgccgggcaggtcagccatattccgacaacgccggaattggcagagctgaagcaggtgctgtgctatgacggttatctcacgccacaaaatccggcgaatcaacatcattgtattggtgccagttatcatcgcggcagcgaagatacggcgtacagtgaggacgatcagcagcagaatcgccagcggttgattgattgtttcccgcaggcacagtgggcaaaagaggttgatgtcagtgataaagaggcgcgctgcggtgtgcgttgtgccacccgcgatcatctgccaatggtaggcaatgttcccgattatgaggcaacactcgtggaatatgcgagcttggcggagcagaaagatgaggcggtaagcgcgccggtttttgacgatctctttatgtttgcggctttaggttctcgcggtttgtgttctgccccgctgtgtgccgagattctggcggcgcagatgagcgacgaaccgattccgatggatgccagtacgctggcggcgttaaacccgaatcggttatgggtgcggaaattgttgaagggtaaagcggttaaggcggggtaatctgctctcgcagtgtttgccggatgcggcgtgaacgccttatccgacctacgtgtgacgtgtaggcctgataagacgcgataagcgtcgcatcaggcatgctgctccagacgccgcaacttactgctgactcgcctgctgaaacaggttttcccacatatcggtcaccagcgcctggtcacgcgggctcaattcaccagcaccaatggctttttccagactctggctaacggtcgtatgcaccgcctgagcggagtggtcatcaccactttccagttctgcgatggctaatgtcaggtggccacgcaaatacccactggcaaacaactcatcatcactggcatggtcaaccataccgtcgattaatgccagaatgcgactttcaaactccgcgatcatcttctttcctcattgtaaaacgtggcgctggcttcagttgagcgcttccggccacgggaactgttccgccgtaagttccggcgtgtgataataattttgtagtgctttaatgaagcgtgccggacgttccggaatgccatttgtcagataatccatcacctgcgcatgtactcgccgttgaaacaccacacgatccggttcgaaatccccttccagattgtcgcaactgacgttaaacggatatcccgccgccacacagaacaaccagtcgagcgcctgcggcttcacttcaacatcttcaaactggctttgcgtttgggcatcgcgtccgtccgggcaataccagtagccgaaatcaaccagctcacggcgcgctttcccggcaatacaccagtggctaatctcatgaattgcgctggcataaaagccatgagcaaagacgattcggttatacggtacttccgcatcagcaggaagatagatcggttcgtcgtcgcctttaatcagacgggtattaaaatcatcggcaaagcagctattaaaaatttcaatcaactgctcgtagtggtgtgtactgttcattagttcatccccaaccagtggaggatctcctgtccgtggctgtcgtaaagtaatttggcactcatcaccgcgctgacgataacaatcatcgggcggatcagcttttgtcctttgctcaacaccagtcgactacccatgcgcgcgccgaggaactgccccaccagcatgacaaagcccgtcgcccaaatcactttgccgccgagaataaacagcagtaaaccgccgatgttactcgttgcgttgagtaatttggcgtgagccgtggctttggcgaggttaaatccgcacagcgtaacgaaggccagcgcgtaaaagctcccggcagccgggccaaagaatccatcataaaaaccgacgcagccaccggctattaacgcgaagggtaaaccgtacatccggcgctggcggtcttcttcacctagctttggcatcagcaagaaatagaggccgatacaaattaccagaatgggcaaaatctgccgtaagacatcagcctgaacgtattgcaccagcagtgcgccgctcatactgccgacaaaggtcatggcgatattgagtttctgatcgcttaaactaaccactttgcggcgaataaagtagatagtagcggaaatagagccgccgcaggcttgcagtttattggttgccagcgcattagcgggagacatccccgctgccatcaatgccggaatggtgagtaacccaccgccaccggcaatgctgtcgataaatcccgccagcatggcgacaaaaaagagaactcccagcaacagcggggaaaccataaacaggctattaaacgtttccattagatcacgtgctcatccagtagcgcctggcaggaaggcggcaacggaggcggtgtcttcttctcaggctttgttgttcccggttttggaggttcaaaccagctttgcagttctgccccgcaaccatcgccacttggcggtaaaggttgatcttcacactccagactatcggcagggcaacgtaatcgtacatgcatatgcgcgcgatgctggaaccagggtcgcactttgcgcaaccagtcgcgatcggtgcccgcatcaaggcaaagttgttgtttaatcgccggattaacaaaaatgcgcgtgacgtctttgtcctgggcggcgagtttgatcaagctgaaaatttctggcttccacagcgtggagacaacgtgtttaccgtcgcgggaaactaagtccagtgcttgcgggcgcaagagctgcgcggaggtccagcgagttttcggcagttgcagaaagatatcgacatccagtccggtctggtggctggcatgaccgccgttgaaacgcccaccagcgggcatccccatatcgccaatcagcaccgtacccatgcccagattgctcacctggctactcagacgctggataaacatcaccagatccgggtgaccgaaatagcgacgctgatcggtacgcatgacctgataatgttcggactgtatcggcagcgtgtcagcgccgacaatacagccattagaaaaactgcctatgctttgtgcgctacccggcacaggttgggttattttttgccacggcgtcgctgccaggctggcgctactggcaagcagagccagcagcgcaatcgcggttttattcattttttaccagcgtggaatatcagtcttcacatcggcattttgcgcccgttgccgtaacaggtgatccattaaaacgatcgccagcatcgcttctgcgatcggcactgcgcggatcccgacacagggatcgtgacggcctttggtgatcatctcaacttcttcgccaaagcggttaatggtacgacccggcacggtaatgctggaggtcggtttcagcgccatatgggcaatgatttgctgcccgctgctgataccgccgagaatgccgcccgcatggttgctctggaaaccgtctttggtgatttcatcgcggttctggctgccgcgcagcgccaccacgtcaaagccgtcgccaatttccacgcctttcaccgcgttgatgctcatcagcgcatgggcgatgtcagcatccaggcggtcaaagaccggctcgccaagtccggcaggaacgccactggcaacaacggtgactttagcgccgatggagtcgccctcttttttcagcgcacgcatcaactcgtctaacgcgtcgattttgtcggggtccgggcaaaaaaacggattttgctcgacctggctccagtctttgatatccagcggaatgtcgcccatctgggtcaggcagccacggatttcaataccaaatttctcggcgagatattttttggcaatagctcctgccgccacgcgcatggcggtttcgcgggcggaagaacgtccaccgccgcgataatcgcgcagaccgtatttttgttcgtaggtgtaatcggcatggcctggacggaaaacgtccttaatcgcactgtaatcctgagagcgctggtcagtgttttcgatcaacaagccaatgctggtgccggtagtaacgccttcaaaaacaccggagagaattttgacctgatccggctcgcggcgctgggtggtatagcggcttgtcccagggcgacgacggtcgaggtcatgttgcaggtccgcttccgtcagcggaatgcctggcggaacaccatcgacgatgcagccgagcgccagcccgtggctttcgccgaaggtggttacgcgaaagagttgtccaattgtgtttccagccatcacggctccgttattgttgtgtttgcgtgtttacttaatctttataaatcgcgaaatgttctcgtgcggcaataagctgctctttggtgagcataaacacaccatcgccgccgttatcaaactccagccaggtgaacggaacatccggatattgttccataagatgtaccatgctgttgccgacttcacaaatcaacacgccatcatcagcaaggtaatctgccgcgttaccgagaatgcgacgcgtcagtttcaggccgtcagtgccagatgccaggcccagttccggctcgtggcggtattcgtttggcaggtcggacatatcttccgcatcgacatacggcgggttagtgacaatcaggtcgtactgcactttcggcaagtcgcggaacagatcggaacgaatcggaatgacgttgtggatcagaccgtgttcttcgatgttctgttcagcaaccgccagcgcgtctggagagatatccaccgcgtcgacttctgcatccgggaaggcataagcacaggcaatggcgatgcagccgctaccagtacacatatctaaaatatgctgcggttgcttgctgataagtccggcaaatttattgttgatcagttcaccaatcgggctgcgcggcaccagcacgcgttcatcgacgtaaaattcatggccgcagaaccacgctttgttggtcaggtaagccaccggaatgcgttcattgacgcggcggatcacgcgttcaacaatacggtgtttttcgctggaggtcagacgcgcggtgcgcatatcttccggaatatccagcggcaggtagaggctaggcaacaccagctgtacggcttcatcccacgggttatcggtaccgtgaccgtaccagatatttgccgcgctgaagcggctcacgctccagcgcaacatgtcctgaatggtttgcagctcatttactgcttcatcaacgaaaattttatccacgtattcctccagggcatgatcgcaataatttcggcggctagtttgccatgaagatgacgataaatcagcattcacgcgcggtgagtgaggaaaaatacgtttaaaacgatcgattgcgctacgagtcgggtaaactgtaggaaaattagaaatagagacagataaatgaaaaagaaaacaacacttagcgaggaggaccaggctctgtttcgccagttgatggcggggactcgcaagattaagcaggacacgattgtccaccgaccgcagcgtaaaaaaatcagcgaagtgccggtgaaacgcttgatccaggagcaggctgatgccagccattatttctccgatgagtttcagccgttattaaataccgaaggtccggtgaaatatgttcgcccggatgtcagccattttgaggcgaagaaactgcgccgtggcgattatagcccggagttgtttttggatttacacggtctgacgcagctgcaggccaagcaggaactgggggcgttgattgccgcctgccgccgtgaacatgtgttttgcgcctgcgtgatgcatgggcacgggaagcatattttgaagcaacaaacaccgctgtggctggcacaacatccgcatgtgatggcctttcatcaggcaccaaaagagtatggcggtgatgcggcgttgttggtgttgattgaagtcgaagagtggctgccgccggagttgccctgaggagttgagcgcgttgcgccaggtacgggtaatggcaggggcgaatgcccctgcctggtgtatctaagggttacaactcattcagtatgtactggaaccggcaagtagaatcgattggctgcatactgctggtatcaacacgcacgaccatatcgtgtaactgtttgtccgttatagggtgtcgatttggcgtgacgctgacttccgccttgtcacatccgctcgcggtaaaagttatcatctgtgcaacccagcggcagtaaccacctgtttcattcatctgcgtactgtcgcacaacttcccatctttcatcaaatacgtactaagcgttttctcaaccacaccgcccgtgctctgcagggtgagcagtttactcttactgacataattctcattccaactaacgtcataaggttgaacagaaacggatggacaaatcgtgtcgtgactatcaggcccctgatacgtcacgccccctggagaggcttcagagtcattcataataaccaaccatggacaagaaaagtaagattcaatctctgcagagacaataacctcaaatgtataatacccgcagttccacccagacggtaatccaggacaacttgctttgttgatattttgatggtagccaatcagcttaacgctaggggcaggaggaggaccactccagctcacattttgcaatatttccccagtcatgagccattgactacttttatattcaccaacgtacactgcggatggcatcattatttttaaattaaaagtcgcaatattacggctatcaccgttgtaaccgtagtaaacgtcaacgctatgcccggcagccatagcttctgtagtagcaataagcatgaccagagcgaacaaccatcgtagtattttcattttaaatatactcaaatgtcgcagttaaagaggcggtaaattcaccgatcgtcacatcacggccgcttttcgcctgtagccaggctctgaaattgatatcgttattgccattggttagcgcaaaggtcgccccatttgtattgttgatggcaacctgcattccgtcggttttttccatgccaattcccactccctgagcggtactactcgtatccagtgccagaaaaccgggttgttcgctgtcttctacccccgtgagcgtgacttttacgttgtatcccgccggccctttgcaatctttcagcttaaagactacgggtacacgagcggactggcctgcaacgttcaaatcctgacgactgaccgtgggaaagcgcacctctgccagatattggccatccaccaccagcgcacaggatttacttaataaattaccggagaaatgcagattattatctgccgcgaataacgtgctactcattgccaatatcagccccgctaacaggacgtaaccaccggactgaatcatacttttattcattgataatccacccgtaatgttgcgtaagcgctaaaattcgtatcgcttaacacagcatcactcgcttttaccggtacggcctccagcttcggcttttgcgtaaaatcagtggcgttgatagcaagcggagtattgagtttaaaacgctgaccatcgtgctgaagctcgataccaaaaccgggtacatcagtttcaattgctgcatcattaaaactggtttgtgtaccagtccaggtgagggtcatctcccaatctggatgacgggtcgtgctgtcacaagtgagttcatatggcacctctttacgaccatagttgccgttgatgtcgtcgataatgagatcgcgaaattcgacttcaatggttttaccaccgctgatgctacaggttggcggactcaataatgtcccgtgaaaggtgatgtcttcatcagcagcatgagctatggcgctactgacacaaagcagggttaagaaagtctttctcattgatagtccaccaccatggtcaaactggcgttaaactcgcccgcagcaagttgcgccccgcttgccttcacaggtacagccttcaactgtggctggttattgatattaaatggcgtccagctattttcaccgacggcaaacaaactgttatcggcgctattttctatccgaatgcccagcccggtgatattggtactgagtaccgtttcgccgttaatcgtactggtattgcccttaagttgcatccgcaagtcgttagcaagactgtttgtgcagttcaacgtgtatttcgcatcttgccgataattggtgccatcaacgttatcagcaatcatattgccgaactctacctggctgcccttgatactacagggtggcggagcatcgaccaacacgcgcagaattaaatccacgggtttactaccagccatagcagataaactacagacactgcataccagcagccctgcgcccactacaaacttttgactcataactccccccgtcatcagcctttgcggctctgctcttcatccacctggcagctgttgccattgcactggaagaacagcggcatccgtgcgccaaagtcgttgacgtaagtcagcaccggtacgctatccattttcacattcagcggtaccgtggttttcggctcaatgaccagagggctgaaccctgcagctggattaccgtttttctgcgcactggcgttgctgataatcacgtagtacggcgttgggttattgacggtaaatgcctgaccgctgcgggtgagcgtcaccttgtgctgccacggacttttcatactgaccttttccagcgcctttggtcgccagaacaacttgatacgcgtttgcagcgcgatttgcagggtattgggtttgttactttttggcgggatctcgcgcacgttaaagtagaacatgctttcacgatcggctggcaatttgttgatatccggcattccctgcacttttacctgcccgttcatcatactatcgatgcgttgcactggcggcagcacagttaacgggctggtgatcttgttacccttttcatcttcaatccagctttgagccagataagggagtttcggatcgttattacgcagcgtcacgctgatacttttgtcgctttcattaaatatcaaacgggtacgatctggcgttacagacgccagggcagacaaactggtagcgctaagcagtaacgccagcgtcatagcacccaatttggcagagcaaagtaaatcagacatggatcattccttaatcacgttattggttagcactaacagaaacagggggatcggtgggtgtcacctgttgcgtctgctcctgaatgacaggctttatgtcatcaggaacaaccggcgcgacgttgcctttatgctggcatggcagtaacaagccgttaaacagatcggcaggcagcgggtccggcaggttgatatcgcaatgcgcaacaccactccagaacacactcatatgttcgccaggtttcaccccagccagatagacactaccgtcatcatcgacaaggcccactgtctgctcgttatcattttttacttctgcgccaaacggtggatggctgccatcttgtaaacgcagcaccgccatcgctttttgaccactgatgacggcaaatttgcggtagccaatggctccttcagttagcgtggcttgcaccacgctctgggttgcttcggcgttttccggcaatttgttgaggtcgatatacgcctgattgcgataataattgttaacgtcagaaacgacggctttaccaaacatattggtataaacagcagccccgttaccttccaccggaacatcggcaacgccatcggcatcaatcagcaggcgtgtcccgcccatattctgggtacggtgaagtgcgccgccgtgggtagtaagcgttgcgccgccctgtaagctcaagcccgcagaggtgtattgcccttcatggtagttcgcactgaggtcaacctgcgccaggctaccatcatggctgtagtagccatcaacgctggtgtgtttgtcactggtgccgatgttcaactgatagtgagtcgcgtcatcgacacggctaaaataaccgacctggctgctgtccgtcccactgccatagttgccgttatagctaacggtactgttgtcgccccacggcatactgagcgaaatttacatgcccttatccgcccggttgtcatactcgtagcggtagccagtcagggaaacgctcatattacgaatgctgcccatattgaaatagtgggagagcatgatgttgtagtttgtctgctcctcacgatcccagtaggtatggcgggtatagttgagataaacgctaacacccgcatcgcggaagttctggttataagtggcggtgtacatctctttgtcgttgcccgtacggaccatttcgctgtcactggcatccagatactcgctcatggtcataaagttctcttcgctgaagcgatatccagcgaaagtgacgcggctgttgagctggtcaaagtctttggaataactcacacggaaggagttaccgtccaggctacctttgccataagcggtgtctttatccagtttggtatggctatgagtaacatcaaacgcgaccgcgccgaaggtagacaaatcgcgaccgacgcccagcgccgcagactgatagttttcatcacccagcgcaccgccatataagctccagccgttagcgatgccccaggaggcttcagcaccagagaaaaatcccccctcgacatggtggccccactcttgcggacgtcccatcatgatcttatagcgaacctggcctgggcgagtgaggtatggcatgctggcggtgctgatgtcatattcctgcacctggccgttctgttcttcaatgcgaatatgcaacgtaccggagacggaatcaccaagatcctgaatacgaaacggtccagccggaacctgcgtttcgtaaatcacacgccccatctggctgacggtcacttttgctgtggtgtgtgccacgccggaaatgtctggcgcgtagccgcgcagattgggaggcaacatttgatcgtcagtgctgacactgccaccaacataattaaaaccgtcgaaaatatcggaattgaggtaatcttcgcccagcgccagtttggcttttaaactcggtaacgcccgccaggcataatagcgactccactcccattttttttgtgtgtcatcgccgccaaattcatcgtcatcatcattactgcgcgtatgttgatagttggtctgccagtcagcgcgcatacgccatggccccaggttaaccccgaccgtcccgttgccgctgatctcgttactgtcatcgccgccattttcttcgtgtcgtgtttgcgcagtgatgctgtagtccgcaatgatcccggagatgccatcatcccaacgagaaggtggatcccagtcgggccaggcatattcgaggtaagcctgcggtagactaatgactaatgcggactggcttaaatcagccttaatttccacgccttccagttgaccgggcttcaggcatttaccatcgtggctccattgcagatttttcgccacgtcttcttttaaaccaaactgcgccaccagttccggtgtcagacaagcatagcttttgctaacgtcatcttcaccagcataccagtaaatatcgtactcttccgccaatggctgtttatttagttgaacctgtaaattgtattttccgggctcaacatacccctggctggaaaaacgcttcagatcaatttttgtgtcgccttttaattccagaaaacgggaatcaaactgaatgtcgtcttcagcccagacactgctataactcccactcattgccagcgcaatgcaccacggaagaatccgtaatcgaaaaagagaatggtcaggcatacacgtttttatccgtttttattcttgttcggtcaaaatccatttaaataccccatagcagtgtcgctatgggggtatgccttacaggtaagtaatctggaaggtggtatttgcttcgaaattacccagatctggcgcatcagctgcgccgaccagccaggctttaaagttcagagtctgcttcgctttgcctttattagtggcagtatctttcacgattttctggtcaatacccatgccgcttttgtaagaggtacccagagagtcaccgatcgccaggctaacattgttaaatgccgcaccggtatcggtattgaaaatggtgtaataattgccgctatttgcagaagaaacggtaccagtaaaggtagtggtcattgtttcctgagtatcaaatacgcaatcttgcaggcgaatctggaaatttttcggcgtggtggtgccgttatttttcagtttttcggcaccgatatcacccatatcaacttccagtttgtgatcgtccggaacgatagaacacacactgtcttcaatggtgccgtaaaaacgtgcagtaccgttgttacccgcagcgattgttgccgtagaggtgaacgcgcccatcaccattgccgcagcaatagctgttttaacaaacttactcattatttgtccttaaactataaataattaaaatataaacattgcaatacattgattcagtcaatagccaatgtttatacccagccattgaatacggcatgcgatccaaaaaaacaggtcgtaaaaaatgtattcgttggtgtggggtcgaatagtgatgttttcactcccctgattcaatttaattttactaatgagtaaatgtagatttaattaatatattgataggggaaagattatcttaaggatcttctaaaaaaacacgaaatatatatttagaaaaaacaggaagcatatcaacaatgaatgccaatagcttaaaaaacaaacaatgaacatataatgcgattggcattaacccgcttttgtcgatataatatataaacactatagccagaatttaatcaagtttcaattacgtcctgcctgattattcaactctattttctccattatctgtattaataaatgataatgagtgtcaaacagacattattcatttcaacatgtaactttgggcaaaatcaagatacgcgcagaagaatactttccgaatgaaagttaaaggtgttttatttatagatggggagagtcttcgatagtagtgaggttgacagatatccgctgcctgatgagcaattatgcccaatgaatctacctcattgggcataatttggaactcatcagatagcttttgccatcttcagattacacgggctcatctgccagttgaatgtgccgtttccgctttcatcaagcgttacgctggcaatggcgctggtggtaaacataggcggcgtttcgcccggacataactcggcaaccagatacccgactaacggtaagtgagagatcaccagtacgctagcaacaccttcattggtcaacgcctgcaaataggcactgaccagaccaacatcgccgcagggcgttaactccggcagaacttctgcactggaaggcaggttcagacaatcccctacttcttccagtgtttgctcggctcgcaggaacgggctcaccagaacgcgttcgatttccactttttgacctttcagccagttcgccatcaggcgagattcgtcacaaccattagtggtcagaggacgaacggaatcactggcggcatcgagggctgcgtcgccgtgacgcatgataaaaacttgcatattgcaccgcttttgttaaccagattcgcccgttttctttcatctgaaaccagagaaagaaaacggtggccggcattgtgccttatccattcaccgaatgaaacgctgttttttacctcaatggcgtaagtatagtcaatatgcgtttacattttgaccaacactccgccattcagcgcggattcatatagctttgaccttcttattgcaggtcagttgcagttgttttccaaaaactttccccacgcgcgcccatctcgaccaaacgctcgcaaggggtaaaacgggaaccatactgcgtggcaagtcgttgcattattgcaaccacttcgcccgcgccgagagaatcgatatagcggaacggtccaccgagaaatggcggaaaaccaatgccaaataccgcgccaatatccccgtcacgcacgctacggataacctgctcatcaacacaacgtactgcttcattcagcatcaacatcacacaccgttcagcaacctgcggtgcggagattcgcccctgcccttgtgtgccaatcagcgggtaaatggcgggatcgacctgttttttgcttttacgccctttctgaccataaagatagaaaccccggccattttttctgcctttgcgatcgtcgttcaaaatactagaaacaacatttgcaggcgcgctaaaacgttctccataagcggcttccagtacaggaataattttagtcccggtgtcgattcctacctcatccaaaagttggattgggcctaccggaaaaccaaatttcactagcgcggcatcaatgtgctctacccgttcaccttgggtcaacatgcggatagcttcattaatgtaaggcgctaagatgcgattgacgtaaaaaccggctttgtcacgcacgacaattggcgttttaccctgttttttcgccagttttactgtggtagcgatggtttgcgcgcttgtccccgcatgaggaataatctccaccagcggcattttttccaccggactgaagaaatgcaggccgataacttgctcaggtcgcgtggcgtgagcggcgatatcaccaatcggtaaagaactcgtattgctagcaaagatggtatgagcggcgcaattttgctcaacttccgccaccatctgttgtttcaattcgagattttcaaacaccgcttcaataatcagatcgcgatgggcaaagccgcgatagtccgtcgttccggagattaatgccagctgtttgtcacgttcgctggctttgagatgacgacggcgaactttgccctccagctgatcccaactgtacttcagcgcatgatttatgccctgcgggttgatatctttaattctgaccggaatccccgctttacaagcagtgacataagcaataccgccgcccatcaagccaccacctaaaatccccacgctgtttaatggcgcaggcggcgcatcactgccgggatctttcttcacgtccgtactggcaaaaaagatactacgcagcgcctggctttgtggcgtcatcgccagttcgccaaacgcccgagcttcggcgtcataaccgctgctggtgccctgcgctaatcccgtttcaacaacctccaggatgcgttctgtcgccggataattgccttgagttttgtgttctgttttcttgccgaccattttgaacagcagcgcacgacctaacggccccgccagaatacgctcgcgtacaggtagagggcgggaagatgggcgctccttctttgccagctcaacagcggcttccagcagaatggagtgcggaacaacgtcatccaccagccccagctttaatgcctgtttcgcccgaagttgttttccggtgaggatcatctctaatgctgtgctgacgcctatcagacgcggtaaacgctgggtgccgccactaccgggtaacaatccaagttgtacttcaggcaaaccgagcaccgttttaggatcgtcagtacaaacgcgaccgtggcacgccagcgccaactccagcccaccacccaggcaagcgccatgaatagccgcgataacctgaatgggcaaagcatgaatctccgccatcaactgttggccctgccgcgccagagcttccgcttcttgcgccgttttgcagttgccgatcatgttgatgtctgcgccagcaatgaagttgtccggtttagcggagacaaacaccacgcctcgcaactctttgttttcacggagttgcttaataatggcgcgcacctggctggcaaactccgccttcagggtattcattttctcacccggtacgtcgatggtgataacggcaatgttgtccagacgaacattaagggtaaacgcacttgtcatttccattattccgcctccagaaccattgccgcgccaagcccaccggcagcacaggcggtaactaaaccaaatccaccgccgcgacggcgaagttcatgcaatgtctgggtaatcatccgcgcgccggtcgccgcgaagggatgcccgtaagcaatgctaccgccaagcacgttaaatttgctatcgtccacttcgccagtggcatgtgcacgccccagtgcttcacgagcaaaacgttcactacccagcaactgaatattcgccagcgtctgagctgcaaaggcttcgtgcatatcgatcaatgtcagatcgctcatcgtcaaaccggcacgctccagcgccagcggtgtactccaggctggaccgagcaacatgtcctgccagacatcaatcgcagtaaatgcgtagctgcgcagataccccagcggcaccagccctaattctttcgcccgggattcagtcatcaggatcaccgctgccgcgccatcggtcagcggcgtactgtttgccgccgttaccgttccgtgtttgcgatcaaacgccgggcgcagctttgcgtaatcggcaaggctggaattaccgcgaatattgttgtcttcgacaagcggttgtttataaggagggataaaggcagtcatcacctcttctttgagttttccgtcactccatgcctgagcggcacgctgatggctacggtgcgctaatgcatcttgctgttctcgggtgatgccgtaggttttcgccatttgctctgcggtgtcgcccatccgcaagccggtagaatattctgctaccgcaggtggtacgggcattaagtcgcgcaaacgcaggcgagagaagagtttcagtcgctggctcatggtacgagctttgttgacatcaaccagcacgcgcgccagttttttactgacgccaattggcaatacgctagaggaatctgccccaccggcaatccccgctcgaatagttcccgccatcaggctttctgcgacgtttgcaactgcctggaaactggtagcgcaagcgcggctgacgctgtaagcatcggtatgtacattcattcccgtaccgagaacaatttcacgcgcaatgttgggggcttcaggcatttgtacgacctgaccaaagaccagttgttcaatcacttcggcggggatctcgctgcgtgccagcagttcgcctaccaccatcttccctaaatcaaccgcgggaatgccatgaaaagccgtcgcctgacgggcaaaaggcgtacgtaaaccgctaacaatggcgatacgatcgccctggcgggtaaccagcggtaaaacctgacccataacactcccctgtaaaaaaataaataaagtggtctgacctgatcatagtcttaaccatttttttacatttagccaagtggagaaaagggaaagtgggagctatgacacagagagaaaagaagaagagaaaagaaaacgcccctgccagcaactgacaggggcgtacgtacccgagaggaattaacgcagacccagctggaaaatcagcatttcagcttcgcaggcaaaagtgaaatcgatatccaggcgcacaccgtcagactcttcagtgaaagtcggggtgattttgcaaggttcagattccacgctacgggctttttcagtcagcgccgccagcgtttgctctgcttctgcgcggtttgcaaacacgcggctgtaagacgcggtgcagtcggagttgtccataatggtgccaacatccatacagcagcaaaccggggtttcatcagcactacatttactcatcgttgatttcctctgtatgtgcacccaaggtgccagataaacgttgtggatattttacgcttccggaaagtgctgctccagttgttaattctgcaaaatcggataagtgaccgaaatcacacttaaaaatgatctaaaacaaaattcacccgaatccatgagtgcgccacctccaaattttgccagctggatcgcgtttcttagatcatatttgaaaaaagatagaaacatacttgcaacattccagctggtccgacctatactctcgccactggtctgatttctaagatgtacctcagaccctacacttcgcgctcctgttacagcacgtaacatagtttgtataaaaataaatcattgaggttatggtcatgagccagaaaaccctgtttacaaagtctgctctcgcagtcgcagtggcacttatctccacccaggcctggagcgcaggctttcagttaaacgaattttcttcctctggcctgggccgggcttatagtggggaaggcgcaattgccgatgatgcaggtaacgtcagccgtaaccccgcattgattactatgtttgaccgcccgacattttctgcgggtgcggtttatattgacccggatgtaaatatcagcggaacgtctccatctggtcgtagcctgaaagccgataacatcgcgcctacggcatgggttccgaacatgcactttgttgcaccgattaacgaccaatttggttggggcgcttctattacctctaactatggtctggctacagagtttaacgatacttatgcaggcggctctgtcgggggtacaaccgaccttgaaaccatgaacctgaacttaagcggtgcgtatcgcttaaataatgcatggagctttggtcttggtttcaacgccgtctacgctcgcgcgaaaattgaacgtttcgcaggcgatctggggcagttggttgctggccaaattatgcaatctcctgctggccaaactcagcaagggcaagcattggcagctaccgccaacggtattgacagtaataccaaaatcgctcatctgaacggtaaccagtggggctttggctggaacgccggaatcctgtatgaactggataaaaataaccgctatgcactgacctaccgttctgaagtgaaaattgacttcaaaggtaactacagcagcgatcttaatcgtgcgtttaataactacggtttgccaattcctaccgcgacaggtggcgcaacgcaaagcggttatctgacgctgaacctgcctgaaatgtgggaagtgagtggttataaccgtgttgatccacagtgggcgattcactatagcctggcttacaccagctggagtcagttccagcagctgaaagcgaccagtaccagtggcgacacgctgttccagaaacatgaaggctttaaagatgcttaccgcatcgcgttgggtaccacttattactacgatgataactggaccttccgtaccggtatcgcctttgatgacagcccagttcctgcacagaatcgttctatctccattccggaccaggaccgtttctggctgagtgcaggtacgacttacgcatttaataaagatgctagtgtcgacgttggtgtttcttatatgcacggtcagagcgtgaaaattaacgaaggcccataccagttcgagtctgaaggtaaagcctggctgttcggtactaactttaactacgcgttctgataacgcgttcgcctggataaagtcacctgcatagcaggtgactttaactcccccacttcaccgaaagtagtgtcctcattgcttacctcctgagttttgcaaacagcctgttggcagcttgccctttcaaatcaataagcggtatccacagacaaacctgaagggaaaggcatattttcaggcgttctgctcgtccttctcaaagagtttacttttctgcatttccaggatactcccccccccctggctattgtgcgctcatacactcaaattaaagataggttctaaataaatgagcgttttttgatagtctatttcattaggtaatatatatttgtaacaaatcaatcaaaatggaataaaatcatgctaccatctattagtatcaacaataccagcgcagcttacccagaatccatcaatgaaaataacaatgatgaagttaatggattagtacaagagttcaaaaacctttttaatggtaaggaaggaataagcacctgtattaaacatctacttgagcttataaaaaacgccatacgagtaaacgacgatccttatagatttaatattaataattccagtgttacttatattgatattgactccaatgatacagaccatattactattggtatcgacaaccaagaaccaatagaattacctgcgaactataaagacaaagaactcgtccgtactatcattaatgacaacatagttgagaagactcatgatatcaataacaaggaaatgatcttcagcgcattaaaagaaatatatgatggagatcctggttttatcttcgataagataagtcacaaactcagacatacggtaacggaatttgatgagagcgggaaaagcgaaccaacggacttatttacctggtacggtaaagataaaaaaggcgactctctcgctattgtaattaaaaataaaaacggaaatgattacttatctctcggttactacgatcaggacgactaccacattcaaagaggaattcgtattaatggtgatagtctcacccaatattgtagtgaaaacgccaggagtgctagtgcgtggtttgaaagcagtaaagctatcatggcagaaagttttgcaactggttccgatcatcaggttgtaaacgagctcaacggggaaagactgagagaaccaaacgacgtttttaaacgttatggtcgagcaataagatatgattttcaagtggacgatgcaaaatataaatgcgaccatctaaaagaaatagtttctactttagtcggtaacaaaattaacgttggccattctcaaaaaatatataagcattttaaggatctcgaaggtaaaattgaagaaaggcttcaaaatcgccaggctgaatatcaaaatgaaattaatcaaccatctgcgccaggtgttaattttgatgatatttaaaattatttttccagttttttgatttttcaacagctgaatatcggaaatagtcagtgacgaacatcagtatttttacataattacgtctaggtcattgtcggtttatctccttttacttgtggtaattgagggataacaacaaaaaaggtgagttttgcgactcaccttttttatttgtttcttattcagaatcaatatcttttaaatcatcctgaatcgcttgtgcgttcggattttcctgcggtttgagttcgccgccattagcgatgaaatcatgacgctggaagtacgcttcgcgcaccataatataaggatcggagctctgacgcagcagaccatcggaatccagcagctgagcgcgggtttcgatcccttcaagcgtccatttacccacagacatcggccaggtcagccaggaaagaaccgggtaaaaaccatccgccatatcaccaccgtcatcacgcagcgtgaagctaccgtagaacggtaactgaacgtaaggcccataacccacgccataatgaccaagcgtactaccgaagcggtgaggttcagtccgttgcagtttcgggttcgccatccctgcaacatcaataaaaccgcccatccccaaaatggtgttcaggaaaaagcgggtaaagtggaccatcccctgataagggtcgccctgcaagaagtagttaaccatcaccgcaggttcttcaaggttgccagtaaagttgctcaaaccgttacgcgccggttgcggaacataatcacgccaggcgacagcgaccggtcgaacaatatacgggtctaatacattgaagttgaagttgtacatggtgcggttgaacccttctaacgggtcagaacgcccttgctgatctgtaccggaactcgcacaccccaccagaagcgtagttcccagagcaagcgcgctcaggcgaagcttcataaatgtctccctgtttttttatggcttatgcagtttgccatccatgacggaacgataccgtatccgcctgtttaggtgtgggcgattgtaacagcacgtcaactgatgtccagacgccctgatttgctgatttgatcatagcctggtaatcgccgccctgtaggctacttgattctatagaaacagaaaaaggcaaacgcagccttttctacattttcagagtaactcccgtcagttgcgagcaaaaaagccgctacgctttagctatacgtgctaattcaagagaagagaccatggacaacgacaaaattgatcaacacagcgacgaaattgaagttgagagcgaagaaaaagagcgcggcaaaaaaatagaaatagatgaagaccgactcccctcccgggcgatggcaattcatgagcatatccgccaggatggtgaaaaagagctggaacgcgacgcaatggcgctactgtggagtgccattgcggcgggtctgagcatgggcgctagcttactggcaaaagggatatttcaagtcgaactggaaggtgtgccgggcagcttcttgctggagaatctcggttatacctttggttttattatcgtcattatggcccgccagcaattatttaccgaaaataccgtgactgcggtactacccgtcatgcaaaaaccgacaatgagcaacgtcggcttacttatacggttatggggcgtcgtgctgctgggtaatattctcgggacaggtattgcggcgtgggcatttgaatatatgcctatcttcaatgaagaaactcgcgatgcatttgtcaaaatcggcatggatgtgatgaagaacacccccagcgagatgtttgccaacgcgatcatttccggctggctgatcgccactatggtttggatgtttcctgcagcgggtgcggcaaagattgtggtgattatattgatgacctggcttattgccctgggtgacaccacccatatcgtggtcggttctgttgaaatcctctatctggtgtttaacggtacgctgcactggagcgatttcatctggcccttcgcactacctactttagcggggaacatctgcggcggcacctttatcttcgcgttaatgagtcatgcacagattcgtaacgacatgagcaataagcgtaaagcagaagcacgccaaaaagcagaacgtgcggaaaacattaagaaaaattataaaaacccggcataaatggcgagggtttaagcaatcgagcggcagcgtacttaccccgcactccattagcgggtatactcatgccgcattgtcctcttagttaaatggatataacgagcccctcctaagggctaattgcaggttcgattcctgcaggggacaccatttatcagttcgctcccatccgtaccagtccgcaaaatcccctgaatatcaagcattccgtagatttacagttcgtcatggttcgcttcagatcgttgacagccgcactccatgacgggtaaaaagtggataaaataattttacccaccggatttttaccctagagccatacagcctcacactcgatgaggcctgtcagtttcttaaaatatcctgatctaccatcgccgtcatagagcgtatttttattacctgatttgcaggttcgattccctattcggagatagcactcatgcaacacgaactacagcctgatagtctggttgatttgaaattcatcatggctgatactggctttggtaaaaccttcatctatgaccggattaagagtggcgacctgccaaaagccaaagttatccacgggcgagcaagatggttatatcgtgaccattgtgaattcaaaaataagctcttaagccgcgccaatgggtaaaatagcgggtaaaatatttctcacatctaaaaaacaccattccaatcaatcccctgctgcttcaagtagatgtctgcaggggacaccatccttgtgtttatccctaaaaccacataaaaaccgtaaattaaattcgaactagcaggccgaataaggcacaccaggaactcgtggttttattcattaactagtggtttttacctgttctcttagccagataataaacgcttcaatttttggccactgcctgcccggtaatgtggtgatgtaataatgctgatggcatttcaccgtcatatcgccaaacggcgcgacgagctcaccactggcaagccttttttgtaccaggcgttttcttcccatcgccaccccaatatgattcatcgcggcaataacagctaaatcagaacgatcaaagccaattccagaagatgtcggcaaattaaccgcataatgttgcgcccaactatgccattcatccgtaccggagtcgttgctccatgcctgtctgtcatggagcaacgtacagtgacacaggttaattaccgtgttggttaaagcatgtctttgagcgtattccgggctacatactggcaggatttcttcatccatcagaaagtgatgagtgagttgcgcactcggcgcatcatcaaagtagatcgccaaatcgattccggcacgttgcagattgacgttgtcattaccagtgagcacggtgaggctaatagacggataccggcgtgtaaagtcacctaatgcgggcaccaaccagcattgggcgatagagggccgggaatacagagttaacgttccgcttaactcctgatttttgatatcaagaatttcctggttcagggtatccaggctgctttttagcgcccaataaacacgtttcccctcgtgcgttaattccactttgcgatgggaacgaacaaacaactgaatgcccaattcttcttccagctgattgatacggtgacttaccgcactggggctcaggctcaattcctctgccgccagggcgaaggactgatgcctggcagccacttcaaaagtatgcattttacttaattgccagccgttaagcagccgatttcttatttcacgaaggggttccataatcacctcatttttcgcttaagtgtaaaaaaatagcggcaaaatttcagctatgagatgagctaaagtgaaccatatctcaattcaccttcatttttagatgtaaatcactccattgatgcaatttacctcatgtgaaaggcaaattttatcgtttgtcagcctgcgttgtttttttgtccaatatcatcaggttaatcacaggggaaggtgagatatgcactctcaaatctgggttgtgagcacgctgcttatcagcatcgtgttaattgtactgaccatcgtgaagttcaaattccacccgtttctggcgctgttgctggccagcttcttcgtgggaacgatgatgggcatggggccactggatatggtaaatgctattgaaagtggaattggcggaacgctggggttcctcgcagcggttatcggccttggcacgatactgggaaaaatgatggaagtatccggggccgcagaaagaattggtctgacacttcaacgctgccgctggcttagtgttgatgtcattatggtgctggttggcctgatttgtggcatcacgctgtttgttgaagtgggcgtcgtgctattgattcctctggcttttagtattgccaaaaaaaccaataccagtttattaaagcttgccattccgctatgtaccgcattgatggcagtgcactgcgtggttcctccacatccggctgctttatatgttgccaataagctgggcgcagatatcggtagcgtgatcgtctacggtttgctggttgggctgatggcaagtctgatcggtggcccacttttccttaaatttctgggtcaacgactgccctttaaacctgtacccacagagtttgcagatctcaaagttcgcgatgaaaaaacactaccgagtttaggcgcaacgttattcaccatactgctacccattgcgctgatgttggttaaaacgattgccgaattgaatatggcgcgtgagagtggtttgtatatcttggttgagtttattggcaaccctatcactgccatgtttatcgccgtgtttgtcgcctattatgtgttgggtatacgccagcatatgagcatggggacgatgctcacacatacggaaaatggcttcggttctattgctaatattttgctgattatcggggccggaggcgcattcaacgccattttaaaaagcagcagtctcgctgatacgctggcagttattctctccaatatgcatatgcacccgattcttctggcctggttagtggctcttattctgcatgcggcagtgggctccgctaccgtggcaatgatgggggcaacggcaattgttgcacccatgctgccgctgtatcccgacatcagcccggaaattattgcgattgctatcggtagtggtgcaattggctgcactatcgttacggacagccttttctggctagtgaagcaatattgcggcgctacgctcaatgaaacatttaaatactatacgacagcgacatttatcgctagtgtcgtcgctctggcgggcacattcctgctgagttttatcatctaagcgcaaagagacgtactatggaaaacgctaaaatgaacagcctcatcgcccagtatccgttggtaaaggatctggttgctcttaaagaaaccacctggtttaatcctggcacgaccagtttggctgaaggtttaccttatgttggcctgaccgaacaggatgttcaggacgcccatgcgcgcttatcccgttttgcaccctatctggcaaaagcatttcctgaaactgctgccactggggggattattgaaagtgaactggttgccattccagctatgcaaaaacggctggaaaaagaatatcagcaaccgatcagcgggcaactgttactgaaaaaagatagccatttgcccatttccggctccataaaagcacgcggcgggatttatgaagtcctggcacacgcagaaaaactggctctggaagcggggttgctgacgcttgatgatgactacagcaaactgctttctccggagtttaaacagttctttagccaatacagcattgctgtgggcagtaccggaaatctggggttaagtatcggcattatgagcgcccgcattggctttaaggtgacagttcatatgtctgctgatgcccgggcatggaaaaaagcgaaactgcgcagccatggcgttacggtcgtggaatatgagcaagattatggtgttgccgtcgaggaaggacgtaaagcagcgcagtctgacccgaactgtttctttattgatgacgaaaattcccgcacgttgttccttgggtattccgtcgctggccagcgtcttaaagcgcaatttgcccagcaaggccgtatcgtcgatgctgataaccctctgtttgtctatctgccgtgtggtgttggcggtggtcctggtggcgtcgcattcgggcttaaactggcgtttggcgatcatgttcactgcttttttgccgaaccaacgcactccccttgtatgttgttaggcgtccatacaggattacacgatcagatttctgttcaggatattggtatcgacaaccttaccgcagcggatggccttgcagttggtcgcgcaagtggctttgtcgggcgggcaatggagcgtctgctggatggcttctatacccttagcgatcaaaccatgtatgacatgcttggctggctggcgcaggaagaaggtattcgtcttgaacctagcgcactggcgggtatggccggacctcagcgcgtgtgtgcaagtgtaagttaccaacagatgcacggtttcagcgcagaacaactgcgtaataccactcatctggtgtgggcgacgggaggtggaatggtgccggaagaagagatgaatcaatatctggcaaaaggccgttaataacgtttcaacgcagcatcgcaatcctttccctgggtgagcgatgctgccgatggcgcagacttaagatccccggtcttacccgctataaccccctccttttatcatcacccaacgcctttcgctgtaaacggcggtttcgcaaaccaaaccaaaaccgtaagtaagataaaagcaatagccgccatacggaaaatctcatttgcagaaatagaaagactctgctgggttatttcattattaatttcattaagaactccactaaggctaccataatatttatccataatttgactgctactattaaacacggggttaaattgatcgatggttgctgtcaactgactatggtgtaagctttcgcgtcgtccccacagcgtcattgtcaagctcgtaccaacacttccactcaaggtacgaaaaaaattactcatactgctggcattggcaaatttattatctggcaagccactaaagctaatcgttgttaagggtaaaaagaaacaggcaacggcgaatccctgaaaaaactgcggcaaaatgatgcctgtaaaatcaatcgttggcataaatgtcacagaacgccagtaatagcaaaccgcatacatcaaaaaactaaatgtcactaacaaccgcatgtctattttgttgccataacgtcctatcaaaggactaattaatagtggcatgatgccgatgggcgcataagcaagtccggcccatatcgcattataccccatcgtttcctggagtaactgcggcataaggacgatcgctccagagtaaaataaatacgcgcatgtgatactcacaataccaatggtgaagttacgggacttaaacaaactgagatcaagaatcgggttctcactggtgctctcccaaatgactaaagagatcagagaaataacacttactactgttaatattattattgtactgctgttgaaccaatccagatcgcgccctttatcaagcataatttgcaagccaccaacaccgagcactaacagggtcagtcctggtagattcattttgaccggactagtctcagtttctcttcctttaagtaaggttaagcataatgtcaggacgataatccccatagggacattgattaaaaatatccaaccccagctaaagttatcacaaatataaccgcccaatatcggcccacatatcggagcgataatcacggtcatactccataatgccagagcaaatgttcttttttctggcggataattccttaataataaactctgactcagtggaattaacggccccgccattaacccctgaacgactctaaaaaatatcagcacatcaagattggtgcttaggctacacattaaactagacaggctaaaaaaagtgacactaagtaaaaataatcttaattcgcctattctttgtgccaacctgccagtaacagggatcgcaatggcatttgctacaccaaagctggtgataacccaggtgccttcgtctgtacttgctcccagaaagccagatattgtcggtattgcgacgttagaaatagtggaatccaacatttgcataaatgtcgctaaactcaatgcaatagtgacgcaccataacgtcccaccggttaatggtgccggagtacttttagtgattgccattaaagttgtccattatggctaataatgttgctaatttctttttctatcggactggtatcgataactaaagccttactggtataagccggcatggaggtcacggtactagccagctcaggcatctcggcaatgtcttcgttcttcgtatcaatagttgctgtcatgcttaaaccaatacgcaaggggtgttccatgagttcttttggatcaagagaaacttcaaccggtacacgctgaacgattttgatccagttccctgtcgcattttgtgcaggtaataaggagaacgcattgccggttcccatattgatccctgtcacccgaccatgaaacacaacattttcaccataaagatcgctgataatattgacgctttgaccaatccgtacatccgtgagttgtgtttctttaaagttggcattaacccacatttgacgtgccggtacgacagccattaagctttgtccggggctcactgtttcgccgacctgaacacttctctgggcaatatagccggtaaccggactcttaatatccgtacgtttaagcgccaaccaggcttctttagttgcatccgccgcttcaacgacttgtggctgacggtttaatggtgtgttcattactaaagctttattcgctttataagcctggatagcggcattcaatgccgctttgctacttattaacgtatctttggtatgctccagcgtttctttactaataaccccctgcttcgctaacggcactcgacggttataatcttctaaagattgttgatactgaatacgtgcactagcgacttcggcactgtattgtttatcctgtaagtatagtttattcgtttgccgaacaatatttgccagattatttttagctttattgagtgcgatagtggcatcagttttatccagactaactaaaatgtcaccttgtcgaacgtagttcgtatctttatgattaacgacagtgacactaccactgacttgtgcagaaattggatctgcattccccgtgacataggcgtcatctgtactaatcatgtcttctaattccatactccaataggcataggcaccactaaacgcaataaataaaactaccgccaataaagaaaagtattttcttctgttagaatgttttttattactattaatctgttccactattatctctcatttctcatagatgaaatttatgaattgaatgaaaagagcattcattcttcatatcaaacacagtgcatgtgttgcacattatcccaggaacgttggaggcctaatttaaatgaggtgcaaaaaaaacaacagaggactaaaccgtggcttttgcaatacaattcttacgcctgtaggattagtaagaagacttatagtgccaacttgaaactataaatcatcggtacaatccctgattttattgttgacatttcatttatgccgactatttatatggtatacttgtcgaattatcttaaaggaagctcagattttcttatttttattgagaaaatgagatgacgccttatgtctgtattactacagggagaagggagatgcttcattgcaaagggaataatctatgaacgcaataattattgatgaccatcctcttgctatcgcagcaattcgtaatttattgatcaaaaacgatattgaaatcttagcagagttgactgaaggcggaagtgccgttcagcgggtggaaacacttaagcctgatatcgtcatcattgatgtcgatatccccggagttaacggtatccaggtgttagaaacgctgaggaagcgccaatatagcggaattattattatcgtctccgctaaaaatgaccatttttacgggaaacattgtgctgatgctggcgctaatggtttcgtgagtaaaaaagaaggcatgaacaatatcattgcggctattgaagctgcaaaaaatggctactgctatttccccttctctctcaaccggtttgttggaagtttaacgtccgaccagcaaaaactcgactccttaagcaaacaagaaattagtgtcatgcggtatattcttgatggcaaggataataatgacattgctgaaaaaatgttcatcagcaacaaaactgtcagcacttataaaagtcgcctgatggaaaaattagaatgtaaaagtctgatggatctttacacattcgcacaacgtaacaaaatcggctaaccacatgaagtttttaccctatatttttcttctctgttgtggtctttggagcaccataagtttcgcagacgaagattacatcgaatatcgtggcatcagtagtaacaaccgtgtcacacttgatccactacgtctgagcaacaaggaattacgttggttagcgagcaaaaaaaatcttgtgattgcagtacataagtcccaaacggctacgttgttgcataccgatagccagcaacgggttcgtggtattaatgctgattatttaaatcttttaaaaagagcgttaaatatcaaattaacactccgggaatacgcagatcatcaaaaagcaatggacgcgcttgcagaaggtgaagtcgatatagtgttaagtcatttagttactagcccgcctcttaataatgacattgctgcaaccaaaccattgataattacctttccggcgctggtaaccacccttcacgacagtatgcgaccgcttaccagtccaaaaccagtaaatattgctcgggtagcaaattaccccccagacgaggtaattcatcaaagttttccaaaagcaacaattatctcttttacaaatttatatcaggcattagcatccgtcagtgctgggcacaatgattactttattggtagtaacatcattaccagcagtatgatttcccgctatttcactcactccttaaatgtagtgaaatattataacagcccgcgtcaatataattttttcttgaccagaaaagaatctgtcattcttaatgaagtactcaatagatttgttgatgctttaacaaatgaagttcgctatgaagtaagtcaaaattggcttgatacaggaaacctggcctttctgaacaaaccattagaactcactgaacatgaaaaacagtggattaagcagcatcccaatttaaaggtgctggaaaatccttacagccccccctattctatgacggatgaaaatggcagcgttcggggcgttatgggggacattcttaatattattaccttgcaaacaggtttaaatttttctccgatcaccgttagtcacaatatccatgctggaacacagcttagccccggaggatgggatataatacctggcgctatttatagtgaagatcgagaaaataatgttttatttgctgaagccttcataacaacgccttacgtttttgtcatgcaaaaagcgcctgacagtgaacaaacattaaaaaaaggaatgaaagttgccattccatattattatgagctgcatagccaattaaaagagatgtatccggaggttgaatggatacaggtcgataatgccagcgctgcatttcacaaggttaaggaaggtgaacttgatgctctggtcgcgacacagctaaatagccgttacatgatcgatcattactatcctaatgaactttatcattttcttattcctggcgttccgaatgcaagccttagcttcgcttttcctcgcggagaaccggaacttaaggatattattaataaagcactgaatgcaattcccccaagcgaagttctgcgcctgacggaaaaatggattaaaatgcccaatgtgaccattgacacatgggacctatatagcgagcaattttatattgttacgacattatccgttttattagttggcagtagccttttatggggattctacctgttacgcagtgttcgtcgtcgtaaagtcattcagggtgatttagaaaaccaaataagtttccgaaaagcactcagcgattccttaccgaatccaacttatgttgtaaactggcaaggtaatgtcattagtcataatagtgcttttgaacattatttcactgcggattactacaaaaatgcaatgttaccattagaaaacagtgacagtccctttaaagatgttttttctaatgcgcatgaagtcacagcagaaacgaaagaaaatcgaacaatatacacacaggtatttgaaattgataatggcatcgagaaaagatgcattaatcactggcatacattatgcaatcttcctgcaagtgacaatgcagtatatatttgtggttggcaagatattactgaaacgcgtgatctaattaatgcactcgaggtagaaaaaaataaagcgataaaggctaccgtagcaaaaagtcagtttctggcaacgatgagtcacgaaataagaacaccaataagctctattatgggcttcctggaacttctgagcggttctggtcttagcaaggagcaacgggtggaggcgattagtcttgcctacgccaccggacaaagtctcctcggcttaattggtgaaatccttgatgtcgacaaaattgaaagcggtaactatcaacttcaaccacaatgggtcgatatccctactttagtccagaacacttgtcactctttcggtgcgattgctgcaagcaaaagcatcgcattaagttgcagcagtacgtttcctgaacattacctggttaagatcgaccctcaggcgtttaagcaggtcttaagtaatttactgagtaatgctctcaaatttaccaccgagggggcagtaaaaattacgacctccctgggtcacattgatgacaaccacgctgttatcaaaatgacgattatggattctggaagtggattaagccaggaagaacaacaacaactgtttaaacgctacagccaaacaagtgcaggtcgtcagcaaacaggttctggtttaggcttaatgatctgcaaagaattaattaaaaatatgcagggcgatttgagtttagaaagtcatccaggcataggaacaacatttacgatcacaatcccggtagaaattagccagcaagtggcgactgtcgaggcaaaagcagaacaacccatcacactacctgaaaagttgagcatattaatcgcggatgatcatccgaccaacaggctattactcaaacgccagctaaatctattaggatatgatgttgatgaagccactgatggtgtgcaagcgctacacaaagtcagtatgcaacattatgatctgcttattactgacgttaatatgccgaatatggatggttttgagttgactcgcaaactccgtgagcaaaattcttccttacccatctgggggcttacagccaacgcacaggctaacgaacgtgaaaaagggttaagttgcggcatgaacttatgtttgttcaaaccgttgaccctggatgtactgaaaacacatttaagtcagttacaccaagttgcgcatattgcacctcagtatcgccaccttgatatcgaagccctgaaaaataatacggcgaacgatctacaactgatgcaggagattctcatgactttccagcatgaaacgcataaagatctacccgctgcgtttcaagcactagaagctggcgataacagaactttccatcagtgtattcatcgcatccacggtgcggctaacatcctgaatttgcaaaagttgattaatattagccatcagttagaaataacacctgttagtgatgacagtaagcctgaaattcttcagttgctgaactctgtaaaagaacacattgcagagctggaccaggagattgctgttttctgtcagaaaaatgactaaatagcggctcccacaatgttcaaatgtgggagctatttaccagcacatcttacatttaactactgaactcctggcgaatttgttccccatgctggtcgagcgttgccgctcccggcataacatgcgggtccgcgcagccgctgatttttatcggattacccggcatcattattcccccggcttcaatcaacatatttctcgcctgagtttgtggcaatttaatggcctcagccacacttaataacggcgcgacgggtacaccaacttcatgtattctggctaaccaaacttcagctgcctgcgtttttaacgtccgctcaatatattgtttaagaatagcctggttttgtacgcgtaaaatattgctgctaaatcggggatcattaaccagttccgtaagctccagtgcctggcataacgcagaaaaaagcttgtcattaccacaacaaatcgtaatcggcttatcctgagtattgaaaacatcaaaaggtgccatgtagggatggcgatttcccagacgttgtggactcttcccagttgcgatatatgccatcagaccatgctccagaaaactcagcgtggcatcaaacatcgctatatcgacatgcgcccctctctggctcttttcgcggccataaagtgcactcactattccgctgaataaatagacaccgccgcatagatccgcaagagatgtaccaacgcgcactggcggagcatcaggatatcctgtttccatcattatcccgctcattgcctgaatgatggtatcgtaggcaggagcatcttttagcggaccggtatgtccgaaaccactgctactagcatatatgaggcgcgggttgatttcttgaagcgtttcccaactaaaccccagtttttccattgtacctgggcgaaaattctcagctaatacatcagcttgtttgagcatatttataaatatacttttatcgtgatcattctttaaatcaagaaccacactctctttgccatgattaataaaactgtaatagagactctgtccatccacatagggaccaaatgtgcgggtatcatcaccatgacccggcggctcaactttaattacccttgcgcccatattacaaagaagttgagttccgaaaggtccattaaggacatgtgtcatatcgataactaataagccttcaaacggccctttgctttcattatttgtcatttgcttatgccttgaaaaaagccgaaggtgaaaagacacttcggcatttatgtaaaatcaataacatgattaattaactaaccagtcgactgacataaatccacaagggagccgtgacgacaaagcccagtacgctcacagccaaactcgctgtaccagtacgggtgtagacattaaaccggctggcaataatgattccggagaatgccggcggtaatgcgcctgccagtaccatcatctgcagatgttcgctgttcaaatgacatgccataccaacgagaagcagtgccagtggcatcagaatcagcttcaggaaggtgttataagcaatttcggcactgaactcgaatttatgtgcagccagagtcaaccccgcagcgaataccgctaccccactgttagccttcgcaatcagattaaaggttgggtcccatgctgccggaatttttaccccaaccaacaccaggatcgttgccagaacaggtgcccatactactggctcctttgccgcagaaattaatgcgctcagattactattcttcttaccatccgctccactagaaggattcagcaaatacagaccaataggaatagtaattgcgttaacaataatagaaataattgctaccactaaacctgtacttacggaatcaccataaataggatcgagaactgcaaaccccaggaatccaatggtaggactacctgcaattaatgcacatacagctgcttctgcatgggtacgtttaaaaaatttgtagcaaccgaaccaggagaaaaagaaacatccgacaataaccacaagacttacaagggtcagacgagtgtccgcaaaaatcatttccctgtttgcccgagtaatagatacaaatagagccgcaggaagcgcgtagtttaataccagtttattaaatgcccgagcttgatcttcactaaatgtttctcgtctgccgctaaaataacccaacagcatgattacgataataggcaataaatcgccaataaaaaatgttagcataatagtatttccgataagggtcccctcaccatcgcataatgagttggcaagaggagacgatgtcagtatttaattaccagcgacttgttttgggttaagtttggtaatatggccactttcagttcctgctgcagggtcgatgaccacattaataatggtcggtttgcggctctgaataccggtggttaaagcatgacgaagttcatctgtcgtggtgacgttatagccaacgccacgaaacgcatccattaatttgtcataccttgcatggtgcaacagatccgttggacttggtgcaccagcgccactgagatcaacaccgtctcctctgtagatgccgccattattaaaaataacgatcgtcaccggcaggttatatcgacaaatcgtttcaatttccatcccactgaaaccaaaagcactatcaccttcaatggcgacaaccggagaaccagaagtcacgctagcaccgatggcatagcccataccgatgcccatgacaccccaggtaccacaatccagacgacgacgtggtttatacatatcaataatatttcgtgcattatccagggtatttgcaccttcattaactaaataaatatcctggttctcgcgcaatacgtcgcgcacagcacttaatgcattaaagtaatttaatggttgagtatctgtacttaatttttcatgcattttttgtgcattttgctgcttgtggatatttaaaatatcgcgccataccagtggagtcgtaaatgtgttttgtttcagttctgccagcataccttgcatactggatgcaatatcaccaacgactggcacagcaatggggcggttgctgtcaatttcctgcggttcaatatccagttgaataaactgtgtatctgccgcccatccttttttaccgtgtgccaataaccaattcagtcgtgcaccaacaagcatgacaacgtcagcatttgccagggcaaagctacgcgcagctgccgcagaaagtggatgcgtatcttcaaggatccctttcgccatagacattggcaggaatggaatctgagcactttcaataaattcacgaagctgttcatcagcttgactatacgccgcgcctttgccaaggataattaatggccgttcagcttttgctaaaaggctaattgcgctagtgacactcttcgggcatggcaataatgctgggctcggattttcaactttaacaatcgtggttaacgcttcgtctttttccatcgtcgcggccaggacatttgctggcaaatcaagataaactccgccagggcgaccgcttacagagacccggatagcgcgtgccaatgcaatgccaagatcctgcggctgattaacgcgaaatgctgctttggcatacggttttgccgcattcatttggtccagctcttcataatcaccttgctgtaggtcgacgatcgcgcggtcgctggagccgctaatcatgatcatcggaaaaccatttaccgttgcgttggccaatgcggtcaaaccattgaggaatcctggcgcagaaactgtcaggcagatccccggtttttgggtaagaaaaccgcttgccgcagcggcatagcctgcgctctgctcatgacgaaaaccaatataacgaatgccttccgcctgggcatggcgtgccatatccgtcacaggaatacctacaacaccataaatagtgtcaatattattctgttttaatgcttcaacgatgatatgcataccatctgtcatttgaagttgatcactcatgattaataacctcgaaatttttataaattgggagccagaagcccccgttaatatcagatggcgtggttttgcttcattgcagcaatttcatcgtcgctataacccagctcctgcaatacagcagcggtatgttcacctaatagcggcgcagctttaatatccggcgtaaaggcagagaatttcattggacaaccaacggtcagatattttccacgcaacggttgttccacttcaacaacactgccactttggcgcaaagagggatcaagactaatttctttcatacttaaaaccggtgcacaaggaatatcaaactgagtcaaataggccaccgcttcatgtttatcaatagtgacagtgtatttttcgatttcagcaaaaatatcgaaaatatgtggctgtcgtgcatgggctgtactgtatgccggatcggtaatccattctggtttgccgatggctttacaggtgttttcccagttttgctcctgaatagtgaaataaatataggcgttaggatcggtttcccagcctttacatttcaggatccagccaggctgaccgccaccacctgcattaccaccgcggggaactgcatcaccaaatgtaccattcggatactgcgggtattcttccagatgacccaatttatcgagacgctgctggtcacgtaatttcacgcggcaaaggttcaatacggcatcctgcatactcatggtgactcgttgcccacgccccgttttttcgcgatgcagcaaagcagcaagtaaaccgatcagcaaatgcattccggtgttgctgtcacccaacgctgcagcgcttaccagcggcggaccatcccaaaaacccgtagtggatgccgcgccacccgctgcctgagcaacgttttcataggcttttacattcacataagggctacactcatcaaaccctttgatgctaccaaaaatcagacgtggattgatttcttgaatatgctcccaggtgaagcccatgtgatcaatggcccctggatgaaagttctcgactaagatatcagcttcgcggatcagcttttccattacctctttgccttccgctgttttggtatttaactcaatagaacgtttgttactgttaagcatggtgaagtaaagcgcatcgatatcaggaatatctcgcagctggtgacgcgttacgtcaccaacgccgggacgttcaattttaataacgtcagcgccaaaccaggccagcatttgagtacaagatgggccagattgcacaccggtgaaatcgagaactttaattccttgaagtggagtactcatagcaatacctattagttaattaaatatgtgttaatttagcgtttatttaaggcgtaatatcttctataaataacccgcaaaatatcgtcgtagctgcactcgatatttttaaaatcctgtatcaagtgctgaaaatcatttcatcgccacttccaattcctttctgcatggtaagtagtgaggacgaaaagaagaatatgataaatattgattcgtggtaatcagagagagtcgcgacatttgtgatgttattcttacaactgtaagaagcgccggtgatttacaagcaagggtatgattacgctttttaaagcgtaccataaaacataacataataaatgatttgtgatgacacgggattattgcggtttactttgaggaatataaaatgcgagtttatagcaccgcgagcgccaaataattttatgaccacaacctgtcgtattgtggtcataaaaaattgtcggctggagggagttaaatcctttacctcaatatactgcctgtcagcattagttcacaaacagtgcttcgctatcgacgatgattccatcttccgcacctttaagcgccaggtttgcctcgtagtattgctttttatcaagcagtttctgcgcatcagcaagtgcattacgagtctgtttaagtggcatcagatattggttttccattacgccaacaccggccaggcgaagctcttccattgcgccctttttatcccctttcgccattttttcattggcaatttttatcgcggcttctttttcgggagttgctacataactctcagaaattccgacagatgcattaatgacaatatattggtcatcattgagattggtctttttacctggcttagcgaactttgcccattcggtactgtcatcactcagcaaagcggaagcttcattggtcagttcttttgccttttctggatcgccatgaaacagagccaggcgcgctacctgcacgtcacgcatcgcatataaaccttgttcagagatacgctctgctgccgctgccgttttctgggtttgctgaacttgctgagtttgctgttgtgccgctaccggagcattatcagcagcccatacagtactagatgccagaattgctgtgaccatcgtggccataattaaacgtttcatacttacctcattctttaacagttttagaaaacgccgccatcatattgggtgagcatgaaatgagaaatcagagagcaacggtcattttgaaagggttatcttacagttgtagttattatcgcaagaagtattttagtcttacaattgtaggaatatgcttcctgtcgcagagaactattcttatataccacaaagagatgtcatttattatatcgatgtaaatactgattaattaaatgtaaatacagccataacatcgtaggttctcagtgaaccattttcaggataactttctatgaaagtaaacttaatacttttcagcttatttttattggtctctattatggcatgcaatgtttttgcattttccattagcggtggtggaagtgagaggagctataaagagactgaaaaaacaagtgcgatgacgaccacacactctacaaaacttcagccaagtcaggcgattttgtttaagatgagagaagatgcgccaccattaaacctcacagaagaaatgccgcccccttttccgacaaaggcgaattatcttattcatcctgtgcgataacgtctttcacatggcaggtgaacaatcatgtctgatgctgatgtgaacacctgcccaaatgagccatcctgacccattaccgcctgccataccccaccataaagcgaatcatcaagccacaagccggggcaagaaacataaatatccccgtcactagttcattaccgccagttaaccacatggtgaagtaataaatgagtgcagcgaggatcaccatgccgaagaaagaagagaccgcgcttaccacgttcagtacctgaccgatgtagccgcttacgcagacaatacacagggcgagaaacatccataaattaatcatagctcaacctcctgccgcgctaaaaaacctgtaacttcagtcactttaatagtaagacaatccttaacctctggcaatttttgctaagcatcaatgaaaacagcatgttaaatgcaagactgttgtgtacggaaaaatatttactttgcacgattaataatcagtagctgaaagcagtcagcgagtgataaagtacagataccgcattcatgctcctcgtggttatgtcctgactagtctttacactctttacaggaaccattgtcgtacatgatggcccaaccaattgagtgtaccgctgtcgacatggaatcttctgcgatacaacaattcgtatctacagaaggtaactatgtttccacaatgcaaattttcccgcgagtttctacatcctcgctactggctcacatggtttgggcttggtgtactctggctttgggtacagcttccttatcctgttctctgctttctcggcacgcgtattggcgcaatggcgcgaccattcctgaaacgtcgtgaatctatcgcccgtaaaaacctggaactttgtttcccgcagcattctgcggaagaacgcgagaagatgattgccgaaaactttcgtagtctcggcatggcgctggtagaaaccggcatggcatggttctggcccgacagtcgcgtacgtaaatggtttgatgttgaagggttggataaccttaaacgcgcacaaatgcaaaatcgcggcgtaatggttgtcggcgtccattttatgagcctggaactgggcggccgcgtgatgggactgtgccaaccaatgatggctacctatcgtccacataataatcagctgatggaatgggtgcagacccgtgggcgcatgcgctctaacaaagcgatgatcggcagaaataatctgcgcggcattgtcggtgcactgaagaaaggtgaagcggtatggtttgctcccgatcaggattatggtcgtaaaggcagctccttcgcgccgttctttgcggtggaaaatgtcgccacaaccaatggcacctatgttctctcccgtctctctggcgcagccatgttgaccgtaacgatggtaagaaaagcggattacagcggatatcgtttgttcatcaccccagagatggaaggctacccgacagatgaaaatcaagccgctgcctatatgaacaagattatcgagaaagagatcatgcgcgcaccggagcagtacctctggatccaccgtcgctttaaaacgcgcccggtgggagaaagcagcttgtacatttaacaaactgctcttactctttccctcctcaaatcggccataataacctcatggtttttatggcttttttcttaaggttttttccttcgctgaatatctaattattaccgtcagaaattaaactgtcgccgatatgagacacttgtaagttactaaaagtaaataagaaaatgcctcttgtctcgtttcagttttaggcgtacattagcgccgtctcgagcagtttagctcagaattctggggtgatgcccacggtaaaatacagggcttttaaggtcgctttgcccggtgtcaactcactgtatcaggtgtaatgaagtcattcaggcgtaacagtaattacgcggagagatgtaaagtgaaatatttctttatgggcatttcttttatggtcatcgtttgggccggtacttttgccctgatgatctaaaagcaaactgtgcaatgaaaaacaggagccatcaggctcctgtttgcatttctgacgacggtgtttattccgcgttttcgtgaatatgtttgctgctggcgggtagtaaaccgtcggcacggaacatcgctttaatccctctgatggcctgacgaatacggtcgcggttttcaatcagtgcaaagcgaacatgcgtatcaccatagtcgccaaagccaatccccgggctgacacaaaccttcgcttcgttaaggagcttcttggcaaattccaggcttcccatggccgcatatggttccgggattttcgcccagacatacatgctagccttcggcatttcaaccatccagcccgcttcatgcagccctttaaccaatacatcacggcggcgtttgtactgttcggcaatgtcgcgcacgcactgttgatcgccctccagcgccgcaatcgccgccacctgcaacggcgtaaaggtgccgtaatcgtgatagcttttaatacgagccagggcgctgaccagcgttttgttgccaaccataaagccgatacgccagcccgccatgttgtagcttttgctcagcgtaaagaactcgactgccacatcgcgtgcacccggtacctgcataatactcggcgctttccagccatcgtagacgatatcggcataggccaggtcatggaccaccagcacatcgtagcgtttcgccagcgccactactttttcgaagaactccagttccacgcattgcgcggttgggttactcgggaagccgaggatcatcatcttcggtttcggataactttcacgaatggctcgctccagttcgttgaagaaatcgacaccttccaccagcggcacactgcgtacctgcgccccggcaatcaccgcgccataaatatggatcgggtaacttggattcggcaccagcaccgtgtcaccatgatccagcgtcgccagcatcagatgcgccaggccctctttgctaccaatagtgacgatggcttcactttccgggtcgatttcaacgtcgtagcgatcctgataccagcgggaaatggcgcgacgtaaccgcggaatgccgcgactagtggagtaaccatgcgtgtccgggcgctgggccacagtacataatttttcgacgatatgcggcggagtcgcaccgtccgggttacccatgctgaaatcgataatatcttcgccgcgccgacgcgcagccattttcagttcagcggtgatgttaaaaacgtagggcgggagacgatcaatgcgcgtaaagcgacgttcagggcgagtgtcagccataatttcctcagattaacgttagcgcccggaccgtccgagcgacgctgccacgatggtggctgttttgaaaatagcctgattaatttctgtctgtccagtgttttagaacattttatcaatgacgttaaatgaggaactctgctttaaaaacaggaaatttatctgcgctaacaagaaaattaccactcattctattaacataataatttcaataaatttactaaccagaagtgcattatcaagagatgcattgctaatacaccatttatctatcaatccccttttaaaattgtggtttttcctcaaaaacggcctgctggtcatcagccttcaggttacctatcatagaggtttaatccttattcagagtcacccgtgcacgaaatattcaacatgctgctggcggtcttcgatcgggcagcgttaatgcttatctgcctgttctttctcatccgtatccgcctgtttcgcgaactgttgcacaagagcgcgcactccccaaaagaattgctcgccgttaccgccattttcagcctgttcgccctgttcagcacctggtccggcgttcccgtagaaggcagcctggtgaacgtacgtattatcgcggtgatgtccggcgggattctgtttggcccgtgggtaggcatcattaccggcgtgattgcgggtattcaccggtatttaattgatatcggcggcgtgacggcgatcccctgctttatcaccagcattctggcgggttgtataagcggctggatcaacctgaaaatccccaaagcacagcgctggcgcgtcggtattctcggcggcatgttgtgtgagacgttgaccatgattctggtaattgtctgggcaccaactaccgcgttggggatcgatatcgtctctaaaatcggcattccaatgatcctcggtagcgtctgtatcggctttattgtgcttctggtgcaaagcgttgagggcgaaaaagaggccagcgccgcgcggcaggccaagctggcgctggatatcgccaacaaaacgctaccgctgtttcgccatgtcaatagcgagagtttacgcaaggtctgcgaaattatccgcgatgacattcacgccgatgcggtggcgattactaataccgatcatgtgctggcctatgttggcgtgggtgaacataactatcagaatggcgatgacttcattagcccgactacccgtcaggcgatgaattacggaaaaatcatcattaaaaacaatgatgaagcccaccgcacaccagagattcattccatgctggtgatcccattgtgggagaaaggggtcgtgaccggaacgctgaaaatttactactgccacgcgcatcagatcaccagcagtttacaggaaatggcggtcggtctgagccaaatcatctccacgcaactggaggttagtcgcgccgagcagctacgtgaaatggcaaataaggcagagcttcgcgccctgcaaagcaaaattaatccccattttctgtttaacgctctgaacgctattagtagcagtatccgtctgaatccggataccgctcgccagttgatctttaatctgagccgttatctgcgctataacattgaattaaaagacgatgagcaaatcgatatcaaaaaagagctgtatcaaattaaagactatattgccattgagcaggcccgctttggtgacaagctgacggttatctatgatattgatgaagaggtgaattgctgcattcccagcctgctgatccagccgttggtggagaacgccattgtccacggtattcagccttgcaaaggtaaaggcgttgtcaccatcagcgttgcagagtgcggaaatcgggtacgcattgcggtgcgagataccgggcacggcatcgatccaaaggtgattgagcgggtcgaagcgaatgaaatgccgggcaataaaattggcctgctgaatgtccatcatcgcgtgaagttattgtatggcgaggggctgcatatccgccgcctggagccggggacggaaattgcgttttacattcctaaccaacgcaccccagtcgccagtcaggctacgttattgctttgagccggagtgatattgtgaaagtcatcattgttgaagacgaattcctggcacaacaggaactgagctggctaattaaagagcacagccagatggagattgtcggcacctttgacgacggtctggacgtgttgaagtttttgcagcataaccgcgtcgacgccatttttctggatatcaatattccgagcctggatggcgtgttgctggcgcaaaacatcagccagttcgcccataaaccgtttattgtgttcatcaccgcgtggaaagaacatgcggtagaagcgtttgaactggaggcgtttgactacattctcaaaccgtatcaggagagtcgtattaccgggatgctgcaaaaactggaagcggcctggcaacaacagcagaccagcagtacgcctgccgcgacggtaacgcgtgagaatgacaccattaatctggtgaaagatgagcgaataatcgtcacgccaattaacgatatctattacgccgaagcgcacgagaaaatgacctttgtctatacgcggcgtgaatcctacgtaatgccgatgaacattaccgaattttgcagcaaactgccgccgagccattttttccgctgccatcgcagtttttgtgtcaatctgaacaaaatacgcgaaatcgaaccgtggtttaataacacctacattctgcgactgaaagatctggattttgaagtgccggtcagccgcagcaaagtgaaagaatttcgccagttaatgcatctttaatcgggaactttcatgaaagcaccaggcttgcccgccgatcaacaatttttcgccgatctgttcagcggcctggtgcttaacccgcaactactggggcgcgtctggtttgccagccagcctgccagcttgccggtgggcagtttatgtattgattttccccgtctggatatcgtgctgcgcggcgaatacggcaatctgctggaagcaaagcagcaacgtttggtggaaggagaaatgctgtttattccggcgcgcgcggctaatttaccggtcaacaacaaaccggtgatgctgttaagcctggtgttcgctccgacctggcttgggttaagcttttacgatagccgcaccacgagcttgttgcatcctgctcgccagatccagcttcccagcctgcaacgcggtgaaggtgaagcgatgcttaccgccctcacccatcttagccgtagcccgctggagcaaaatatcattcagccgctggtgttaagtttgctgcatctttgccgtagcgtggtgaatatgccgccgggcaatagccagccgcgcggcgattttctctatcacagcatttgtaactgggttcaggataattatgcccagccgctcacccgcgagagcgtggcgcagttttttaatatcacgcccaatcatctgagtaaactgtttgctcagcatggaacgatgcgttttatcgagtatgtgcgttgggtgcgaatggcgaaggcgaggatgattttgcagaaatatcatctgagtattcatgaagtggcacagcgttgcggttttccggatagcgactatttttgtcgcgttttccggcgtcagtttggtctgacgccgggagagtacagcgcccgttttcagggctaacgtcagaaggttaattctgtttccagcagcgtcaggatactttgtgcatcttgcgcggcaaacaagctctggcggaagtttttattcaccagtttacgcgccagctggctgaagactttcacatgattcatcccttcgttagcacccagcgtcagcatgatcaccagttcgacttcgcccatttcactctgccagccaatcggtttcgccagccgggcaatgctgatactggaatgacggatccactgagatttggtgtgcgggatcgctacgccaaaaccaacgccggtggtaacaatctcttcccgctgccagacatcttcttccagctcaaacggatgttcagtgcgcccgttaacgccgaggttgccgcacaggaactggatcgcctgctctttattgctaaaatcctgatcaacaaagatattctccagcgccagcagtgggcgaacgtcttcttccggcgtaaaggcggtgagtaacgcttcaatttcctgcgcactgcggcattcacatgcctgacgcgccagttcccgacacgcctcgctatccagttgacgaagctggcttttcaccgccggaatacgcgggctactcatactcagctcatccaggcccagcccaagcagtagcggcagataacggctttcaccgcccagttcaccgcaaatgcctacccatttgccccgctgatgcgcagtggtaactatttgctgcaacatgcgcaggaagcttggcgtaatcgggttatatagcgggcttacgcgcgggttattacgatcgaccgcatacagatactgggtcatatcgttggagccgatactgaagaaatcgacctcatcgcagaagtggtcgatgatgtagcacacgctcggaacttccaccatgatcccaagcgtaatcgtctctgcatgacgcaggccatcgcgcttaagctcaacgatcgctttttggatctcgcctttcacccataagatctgatcgaggctgtgaaccatcgggatcatcaactgggcgttgccgaaactggcggcgcgcaaaatggcccgcagttgagtgcggaacaggccagcaaattccgggtaaatacgtaccgcgcgatagccgaggaacgggttctcttcctggggaatattcagataaggaatgcttttatcgccgccgatgtccatcgtgcggaagataatcggcttgtcgcccgccgccagtagcacctgctggtaggcttcaaattgctcctgctcgtccggcgcgctgtcgcgatccatatagagcatttcggtacggaacagcccgacaccttccgcgccgttggcaaacgcgcctggcgcttccagagcggtgccgatattcgccgcaatatcaatacgcttgttatcacgggaataggccagctgcgcggcagcctgcgcctgttgtttttggcgtttatccgccagcgtctgcgcgacctgataataaccgctcaccgcgtcattcgggttaatcgccagcacgccgcactgggcgtcaagcactgcaggttgcccggcataacgggcaatcgcatccagcggcaagccactcagtaccgggatcgcgctggcacgggccagaatcagtgtatggctggtgcgcccggttttctccagaatcatgcccgcaagatttttcaaatcaaggctcaaaaactggcttggggttaaatcttcagccaccagaatggtcggtttttcaagcaccagcttgttgcgcggcttcagttccggccaggtgatatgcagcaactgttcgctgatatcgcgaatgtcgctaacacgttcgcgcagataatcgctggcagaggcagaaagtttggcgcaaacctgctccatattgctgatgatcgccgcccccagcccctgatgctgttctgtcatcaggcgacggatattgcctgcaaattcatcatcctgaatcaggctcaaatgggcgctgaggatagttttgctttcgccgtcacgctcacgcaattgctggttcagttgctcggcaagcgttgccaggctgtgctccagccgggtggaatcttgcgcactggcggggattgcccgataactgtcgaggctgtcgctttgtaacagggtcagcgtacccacgccgacgccgcttgccagcacattgccgtacagtaaatccgggttaaggcggcttaaactacgcggcagcggatgcgccgtcagttctgcctgcgtaggctgaacgctgtcgctgtcgataaagcgcacctggatgtactcttccagcacgcgccgcgcctgctcttcatcgctgccgctaatgttcaggctgcaactgtcattaaatagggtgccggtgccaatcagcgccaggctgcttttcgcatctgcctttgcgttctggcgatggttaataaaagtgatttcgctttgccactggctgcactgttctttaagttcccacgccggacgagcatgtagaccgttaggcaaaggacagagaaattgaatcgttaacataaccgctccgggttaatcaggagatcatctgaaatccgtcagttgaacaaccgtctcacgcgtaagacgttgaataagggcagataaaagttgctgcatctgcaaaatgtcgcggcaatcggcaatgcttgcggcgcaatgtccatggcgggttgctggccccatcaccactgtgggcacgccggtgccggttaagtgcaccgccccgccgtccgtgccgccgttgctgaacatatctgcctgcaacggcacgccaatttctgccgccacggtttcgacccaggcggtaagttttggcggcgcaatcaggctcttgtcgcttaacaccagcatcggcccgttaccaatctggcgatggttagccgcgccataatcaaagtttttcgcccagcaggcggtatcaagcacaatggcgacgtccgggctcaccgcgcgggtggcagtttgcccgccgcgtaatcccacctcttcgctggaacttgccaccagccacacttccgcaggtagttcggcgtcgtgcagttcgcgcagtaacgtcaccagcagatagcaaccgaggcggtcatcaaaggctttccccatcactcgctggtgagggagaacctgaaaagtggtatcaaacgtgacgcgatcgccgggacgaattcccgcctgcatcacttcgtcataggagcgcgcaccaatgtccacgcgcatggcgctgacgtcattcccctgccggtcgccgtcaagcaggcctggaattttgcactcttcacgggtggtgatgcgcaccggctgcagctggcgggcagccatgcgtacgttgccaaccggcagcacatcaatcgccccttcgcgggagatgctgcgcaccataaatcccacttcgtccatatgcgcacagatcatcaccttcggacctgtgctttcattcaggcggatcagcacgcttcccagaccatcaaatcgcacttctttttgcaggcgatccgcttcttccagcaggatctgccgcacttcctgttcgctggaggcgatcgcatctgcctcgctcaacgcttttaataggcttaaatccattatgcctctcccgtgagcaacactgttttcggcatggcgtagagcacttctgcgccttgcggggtaaccagcacaacatcttcgatgcgcacgcccccttgccctggcaaataaatccccggctccacggtcagtaacatgcctggctgtagcgtcgtggtgtcccgcggactaaaacgcggatcttcatgaacttcaatgccgatagcgtgaccggtgttatgaccgaaatagtcgccataacctgcttctgtaatgacccggcgcgcggcatcgtcaacctgctggcagcgcacgccggggcgaatcgcggagattgctgcgagctgtgcctgcaggacaatttgatagacgttaaacagcaggtgagattcggcgctcaccccttcgccattcaccagcaaggtgcgcgtcatatcagagcagtagccctgatacagcgcaccgaaatcgagagtgacaaactcgcccgctgcaacaatcttgtcgctggctttgccgtgcggcagcgccccacgccagccactggcgacaatggtgtcaaaagaggctttttctgcgccctgctggcgcataaaccactccagttcagcggctatctcgcgctcgctcatccccgcctgaataaagcggcgaatatgctctgcaccgcgatcagcaatcccacaggcgaggcggattttctccacctcctctggcgttttgatttgccgcagcacatccggcgtggcgctaaccagtttcgcattgagttcagactgccagcggtgcgcggtttcccaactcacctgctggccctcaaaaccgagcgtttgcaactgttcatcggcaatgatttgattgacgatagtggtaagcgtgttcgtcgcgtcaagcaaatgcagctggtagccttgcgcacgggcttccacctcaacgtaatagcggctatccaccagaatgtgcgcactttcacggctaatcaccacataaccacttccggtggagatccccagatgcggctgtttgttctgccgactggagagaagcactgcatccagttgttgcgccttaagccagtcgcgcaggctagcgagtaatgtcatctggattttccttcttacaggctatcgattaacaatttgcctttacggaacatcatcagacgcaggaacaccaccatcagcgcagttatgactgcccccagcgcgatccccgccatatagacgcccaggttagtgaccagcggccatgcccagatagcggactccgggaaccattgcactgcgcccagccagacagcggcggtactgccgacaatagcgccgaccatatagctcggaatggcggtgatagggctttccagcgcaaacggaatcgcaccctcactgatccccataaacgccaggaacatggcggtcttaccctgcggataaagttgagcgttgaacaggcgtttgccggttaaacgacggtcgataatggtcgccagccccagaccaatcggcggaataacgatagcgatagaacgagcggtgaccggtaatacgtggtcagtggtaaagctgaaggcaacaaaacctgcggctttgttgatcgggccaccaaggtcgattgctgtcgccgcggcgatccccattgcgtacatcagcgcgcccttctcacctgcggcagtcagcacagtacggataccgccgttgatccagccaccaaagggggtgatgacgtagtacatcgccagcatgacaaaaatggcggaaagaatcgggagcaaaaatgtggttttgaacgctaacaggaaatccggtaactggattttctggttcatccacttcacaaggtaaccggcaacgatagaaataatcagcgcaccaatgaaggtggacggcaccgggctagaggtcgcccattgcatagtgctgggatcgaagttcagcagttgcgtcggctgggtagacatcaacccgccgataaaaccagccgggaacgccagtttgccaccgatagagttcgccacaaaagcagcaaacatcggaatggcaaaaccaaacaacacgccgccgaaggactggctcagccaggcaaatttaagtaaggagaggtcgaaaccggagaatttcccgctattaagagcatccatgatgccgatctcagcaggaattttaagccagctataagcaatcagctggctgaaagcgaggatcacaccgcccataattaaggtcggcaccatgcgactaatcccactcatcacatgctgcgggagttcaccccagaagctggttttagaggcctgcggattcttaactgccgctgccgcaccggatgcgccaggcacaacggttgcactgcgttttttaatggccataacaattatccctgtcgaatattactgttgttcagaggcaatcatctcttcgatttctttgatgatgcccgcagcgtttttaattgcgtcctgcaaagtgatttcataaacgtcgcgactttcgaaacgttcgttatcttccggggtaactgccacggagtggatgatgatggtcgcttcggcgatatcctgcgccgtcaggcgattctggataccgtccgcgccctgggtttcaattttcacttcataaccggcttctaccgccgcttcttccagcgcctgagcggccataaaggtgtgagccaggcccatcgggcaggcacataaggcaatcagtttcttactcatcgttaattcctcgttcagtgatagttgacgagtgaaattatgaacgtgcaaaacaaatcgccgttaccagacaaataatgcatttactggagaattaatcccgctgtacggaagtgtgacgcaggtcgaccttgtgaggggacacaaagaaaaattgaataaactgtatgatttaaaagattatcgggagagttacctcccgatataaaaggaaggatttacagaatgtgacctaaggtctggcgtaaatgtgcaccggaaccgagaaggcccggattgtcatggacgatgagatacaccggaatatcatggacatattctttaaagcgccctttatcttcaaatgcggcacggaaaccggaggctttgaagaactcaaggaagcgcggcacgataccgcccgcaataaacacgccgccaaatgtcccgagattgagcgccagattgccgccaaaacggcccataatgacgcaaaacaggctcaatgcgcggcggcaatcggtgcagctgtcagccagcgcgcgttcggtaatatcttttggcttgagattttctggcaggcggttgtcagctttcacaattgcgcgatacaaattcaccagcccagggccagaaagcacgcgctccgcgctaacatgaccaatttccgcacgcaatatttcgaggataatggcctcttcttcactattcggcgcaaaatcaacgtgaccgccttcgcctggcaagcttacccaacgcttatcgacatggaccagatgcgcaaccccaagccccgttccggcaccgtaaaccgcaataggcttaccttcgaccggttctgcgccaccaaactgaatcagatgctcttttttcagcatcgggatcgccatgcttacagcggtaaaatcgttaataatttccagatggctaaaaccgagattctttttcatttcggcaatactgaacgcccaggtatggttggtcatcgccacccagtcaccggtaattgggcaagcgatggcaatacagccgtctttcacctcgaccttatgttcttcaagataaacgcgaatgaccgcttcgaggctggggtaatcaagcccactataggtcttagcctggctgatttcaccactggcaatatcacacagagcaagacgtgcgttggtgccgcccacatcaccgactaatgcatactttgtcattcttcaactgctccgctaaagtcaaaataattctttctcacactgtaaatacctgggggcataacaacaacgccggaaaggcaggctccctgtaaatatcgatctgggtcacacaattactttatcgtttcagcaccaattgcagcgatgcctttttgcaagctgggcaaactaagtatctgaccccgcataaggaatagaacacaggcggcactaacccggacgtagactgtattacaaaagcggcaaaaagcagagacaaaaaacccccgctttgcagcgagggttggaaatttggtggagctaagcgggatcgaaccgctgacctcttgcatgccatgcaagcgctctcccagctgagctatagccccacgatgcgtttacgtaccaagtttgctgggtgcaaaatttggtggagctaagcgggatcgaaccgctgacctcttgcatgccatgcaagcgctctcccagctgagctatagccccgtcacgtaaagcttgtcgagttgacgggcggcatcatatgaattccgcccgaatgtgtcaacggcaaattgcaacgtgtagtttcaatcgctgaaaaatcaggcaaatgaacaattttggaaaaccgctcgcattcagtagttattcatgtcacggtttcctgtaaagtggtgttataaaatgaactactaatagacccacatacattcagggaattgttatgttcaaggagaggatgacaccagatgaacttgccagactgaccggctatagccgccagaccattaataaatgggtacgcaaggaaggctggacaacgagtccaaaacctggcgtccagggtggcaaagcccgactggttcacgtcaatgaacaggttcgtgaatatattcgcaatgctgaacgtccagaaggtcagggagaagcgcctgccctttctggtgatgcgccgcttgaagtattgctggtgacactggcgaaagagatgacgccagttgaacaaaaacagtttacatccttgcttctgcgggaagggattatcggattgttacaacgcttagggattcgcgatagcaaataatatgaaaagattacgcaataaaatgaccaccgaagaactggctgaatgcctcggtgtggctaaacaaactgttaaccgttggatcagagaaaaaggctggaaaacggaaaaatttcccggcgtgaaaggcggtcgtgccagacttattctggtcgatacgcaagtttgcgagtttattcagaacacgccagccttccataacacaccaatgttgatggaagctgaagagagaattgctgaatacgctcctggagcacgcgccccggcgtatcgacaaatcatcaacgcgatagataatatgacagacattgagcaggaaaaagtcgcgcaatttttgagtcgtgaaggaattcgcaatttcctcgcccgtctcgatattgacgaaagtgcataaataaaaaacggcaggatattatctcctgccgtttatctttttacacgctaattactgctgattttcgcgttcagcaataaaatccagcgctttgttgatacgctcgatactgcgggtcttaccaattgcgtgaacggtaacatccagtgctggagactgccccgcaccggttacggcgacacgcagcggcataccaactttacccatacccacttccagctcatccgccgtcgcctgaatagcgtgatgaacgttttcagcggtccagtcagtaatcgcggccagtttgtcacgaaccacttccagcggctgacgcgctaccggacgcagatgttttttcgcggcgtcggcatcgaactcagcaaaatcttcgtagaaataacggcagctctgtgccatctctttcagcgtcttgcagcgttcgcccagcagtttcaccagatcagccagctgcgggccgttacgggtatcgatattttcctgctcaatgtgccactgtaagtgagtagcaacatactccggcggcagcgcgttaatgtagtgatggttcagccacagcagcttgtcggtgttgaacgcactggcagatttgctgacggcattcaaagtgaagtatttgatcatctcttcacgagtgaagatttcctgatcgccgtgggaccagcccagacgcaccagatagttcagcagtgcttctggcaaataaccgtcatcacgatactgcattacgctgactgccccgtgacgtttggacagttttttaccgtcatcgccattgatcatagaaacgtgcgcgtaaaccggcaccggcgctttcagggccttaagaatgttgatctggcgtggcgtgttgttgatatggtcttcgccacggataacgtgggtgatttccatatcccagtcatcgacaaccacacagaagttataggttggggaaccatcggtacggcggataataagatcgtccagttcctggttgctgaactcgatcggaccacggatctgatcgtcaaaaacaacagaaccttcctgcgggttagcaaaacgtacaacacacggttcatcatcagcatgatgctcatggctgtggcggcagcgaccgtcataacgcggcttctcacctttcgccatttgctcttcgcgcagcgcttccaggcgctctttagagcaatagcatttataagcagtgccctcttccagcatctgatcgatcaccgcgttgtagcgatcaaaacgtttggtctggtagtacggaccttcatcccactccaggctcagccagttcatgccatccataatggcttcgatagcttccggcgtggaacgctcaagatcggtgtcttcaatacgcagcacgaactcaccgccgtggttacgtgcaaaaagccaggagtaaagagcagtacgcgcgccgccaacgtgcagatagcctgttgggcttggcgcgaagcgagttttgattttcatgaaatggccttacgtttagaaagatgccgacaaccggcaaatcctggaaaaattaagtgggcgatattctatcactcccgcctgattcctcaatgtagttcgggtttctaccttacgcattattgttttcgttgacaaattgcgcaacacggtctgttttgcgatcatcttgcttaaatttacgacgaacgaacaatttctttagaaaatgcgttgactcattttgaactctccctataatgcgactccacacagcgggggtgattagctcagctgggagagcacctcccttacaaggagggggtcggcggttcgatcccgtcatcacccaccaactactttatgtagtctccgccgtgtagcaagaaattgagaagtgggtgattagctcagctgggagagcacctcccttacaaggagggggtcggcggttcgatcccgtcatcacccaccactttctcgccagctaaatttcttgtaaaaatgtgaagtaccgaagtgggtgattagctcagctgggagagcacctcccttacaaggagggggtcggcggttcgatcccgtcatcacccaccacttcgggtcgttagctcagttggtagagcagttgacttttaatcaattggtcgcaggttcgaatcctgcacgacccaccaatgtaaaaaagcgccctaaaggcgcttttttactatctgcgatactcaaagattcgaacctgcagcaggtttgagttgagcgcagcgaaacaacggagccgctcgtgctggcgacggcccgaagggcgagcgaagcgagtcatcctgcacgacccaccaatgtaaaaaagcgccctaaaggcgcttttttgctatctgcgatttgcgaaattgcctgatgcgcttcacttagcagactactatttccggcaattcctgtctcctcacttactgtgtcaatgcagccaacagcttaaccatcgcgggcgtcacctgctgtgtttcataaacaatatataaatctgcagggatgcgctgtttgagcggacggaaaatgacacctggccagttcatttgtgcgtagctgtccgctatcaatgtgataccaatgcccatactgaccatagcgagtaccgtttgcggttcattaacttcgcgaataacaaccggactaaatcccacctgctggcaaactcgctgcaaaaaatcccagtcagtgtaaacgggcggcattgtaacaaaatactcgtcacgtagcgcttccagcgggacggtggaaaaactactgagatgatgctcttcaggcatcgccaccagaaacgcgctttcatgcaaccgtaagctggtaaaaccagtcggtggttctgtcgccattcgccagatcccggcatcaagttcgcggcgttccagcaaggccatttgcatcgcgggcatcttttcgcgaaaaagaacgtcaacgttaggattttccctgaggaatcgccgcataaccgggcgcatccgtccccacattgccgttcccactacgccgagttcaatccgccctgcttctccccgacctatttgttcaatccgagccaatacattattagcattcaccagcaatcgacggctttcttccatcaagattttgcccgcgtgtgtcagtacgacgctgcggctatggcgaataaaaagctgcgtgccgagttgattttccagctctttaatatgaatgctgagcggaggctgagacatatttaaacgcgctgctgcgcggccaaaatgcaactcttccgctacggcaagaaaataacggagcaacttaagatctgttctgtatacgcgttccataattaagtgctccatataataaatacatcgtattaaattatcatggcataaagtatttcaccaccagatatccgacatacataaacacaatggataatatacccggtaatacatttggtacaggaataggcaagcgcacgattgtaaacaaagcaccaataccaaaaccaacgccggaagaaaataaaatatctttcactaattaacctttatcataaaagcagctctgaagagcagagccgcgaatccttttaatgagtcaccgctcgatgctttatcttttcagggtcatgattatatttaaacccaaagaaaaatatcactgcgagaaaaagagcatatcctgcaaacaccagccagatagtttgccagtcttttacgccatccacgctaaagtaatctactgccatgccactcagaatgctgccaacccatgcgccgacaccatttaccatggtcataaagagcccctgcgcgctggcacgaatgctggaatcaacttcctgttcgacaaatacgctaccagaaatattgaagaaatcgaatgcacagccataaacaatcatgctcagcagcagcaaaataaatccggttgtactcggatcgccataggcgaagaagccaaagcgcagcgtccaggccaccatactcatcagcatgacggttttaatgccaaatcgctttaaaaagaatgggatagtcagtataaagcccacttctgccatctgactaacactcagtaaaatggagggatatttcaccacaaaactgtcagcaaactccgggttacgggcgaaatcatgtaggaacggattaccaaaaacgttggtaatttgcagtaccgcacccagcatcatggcaaagaggaaaaagatggccatgcgtggatttttaaacagcacgaaggcatccagacccagcttgctggcaaggcttgtggtcgcttttttctccgcaaccggaatcttcggcaaagtcagcgcataagcgctcagcagcaaactcgcaccggacgcgatatacagctgcagactactcaattccagatgcagcaggcttactgcccacatcgcgacaatgaaccccaccgtaccaaaaacgcgaatgggcgggaaagcggtcaccgggtcaagccctgcctgggcaagacaggaataagagacgctgttgcttaacgcaatagtcggcataaacgccatcgcattgactaacatcacccaaaacatcatatccggatcagttacggatgccgcataaaaaagtacgcccgcacacaccaggtgacacagcatgtatgcacgttctgcgcgcagccatttgtctgcgatgatccccattataccaggcataataatcgcggcgatccctttggaactgtaaaccatgccaacattagcgccggtgaaatgaagagtattaatcatgtaagagccgagggtaaccagccagctcccccagataaaatattgcaaaaaggacattacctttaagcgcatcgcgatgctcataatcgtttccttgtcgcatcatttggcctcacccgcgaggccgtttcttattgtttttctcaggcaattttgcgcagaaagccacaaataaggttgatgaagttctgcttagagagctccgcagccgccagcgtttgcgcatgactcaatttcacatcgcttaaaccttccgccatattggtaatcgcagagaccgcaacgactttaaggtcgcaatggcgagcactaataacctcaggcaccacagacataccaacaacatccccaccaataatttgcatcatgcgaatttccgccgcagtctcgaaattcggccccggatagctgacgaacacgccctccgtcagagggaaaccctcctctttcgccactttttgtaacagtgcgcggtattccgcatcgtaggcatttgccagactgaagaagcgctctccaaaacgatcatcgttaagacccaccatcggcgtaccgggcatggtgttgatatgatctttcaatgcgaccaggctgcctgcccccacttccggacgcaggctgcctgccgcattggtgcagaacagtagctcgcagcccagcagcttaaaggtacgaattgcgtcagtcataatggtcattccacgaccttcgtagaaatgtccgcgacctttcatacataccaccggtacgccctggagatggcccagcactaactcccccgcatgaccatgtaccgtacttaccgggaagcccggcagcttttcgtaggaaattgcgacagcgttctcaatctgatcggccagcgcgccgagcccggaacctaaaataaaggccactcgtggcgtgaaatcaggtttataagtcttgataatatctatgcaaaacagcgggttatgagaaaattgaacctgagacatacatatcctttttctgtagggtggaatctaacgcctttttatagcgaggttgtcccggctcttaccaatacacttttctcacgcattcaatagcgattcgatatcgatggatttatatcttttttctattaatccacggtaaaaactgtattggcgatattaattcctttgcattaacaatatgtcgtttttagcaaaccactttattaagcaatctactaataacgatcggcatagggaattatgctatgaaaaaacatcttttaactctgacactttcctctatattagcgatacctgttgtatctcatgcagaatttaaaggcggttttgcagatatcggcgtgcattatctggactggaccagccggactaccgaaaaaagcagcaccaaaagtcacaaagatgattttggttatcttgaatttgaaggtggcgctaactttagttggggagaaatgtacgggttcttcgactgggaaaacttctataacggtcgccataataaaccaggtagcgagcagcgttatacctttaaaaataccaaccgtatttacctgggtgacaccggatttaatctctacttgcatgcgtatggcacctacggttctgcgaatcgcgtgaatttccacgacgatatgttcctgtacggtatcggctacaatttcaccggcagcggttggtggttcaaaccgttctttgctaagcgttatacagatcaaacctattacactggcgacaacggctatgtcgccggctgggttgcaggttacaactttatgctgggcagcgagaaattcactcttaccaactggaacgagtacgagtttgaccgtgacgctacctatgcagcgggtaatggcggtaaagaagggctgaatggcgcagttgcactgtggtggaatgcaacaagtcacattactacggggattcagtatcgatatgcggatgacaaactgggcgaagatttttaccaggatgcgataatctactccatcaaatttaacttctgattgattactgccggggctcccggcagtatgaattcactttatatctgatacaacggatccccttcccgcccagccattagcgcattgccctggtctcgtaccacgtcccataaagcttcagcggcggtggaaagactacggttcttcctgcgcaccagcatcaactggcgttcaacaaccggcgtaatgcgctttaccaccagtgggctaccttcaggcaatggtagcgccagtgcgggaagaatactgatgccgatgcctgcggctaccatcgggaacagcgtcgccggatgtccaatctcctgcacaatattcgcctgaataccattgcgcgccagcgctgcgtcaatcagcggtcggctgccactcgcgtaatcctgcaacaccaatttcgctccctgtaatgcctgccagggtacataatcttccacggccaaagcgctatcgcgatggcaaagcagaaagaaaggctcggaaagaatcgcttcacattgcagatcgcccactgggcctggatcgatgacgatgccaaaatcgacatctccctggcgaatactttccattacccactgctgcggacgatcgtgcaggacaaactgaatatctggatagcggcgatggctttcagcaatgcattgcggaataagatgcgcggaaatggtctggctggcagcgacccgaacttttccgctcagttgttgccccatacgcccggtatcgcgcaacgtgctgttcagttcatccagcagtcgctcaagacgcaaagccagctgctgccctgcatctgtaagcaccacttcacgcgtggttctgtccagcaggcgaacaccagtatgattttccagttccttcacactgtgactcactgcgctctggctcaggccgatacgctctcctgcacgactaaaacttttctcctgcgctactgtgacgaaaacctttaattgttttaaagaataattcatctgttttcttcatgaatggatgcaataaatcaattttatttctcaaactggaagaagcacaatagaaccatcgatcatctggagtctttatgaaactttttcgtatcctcgatcctttcaccttaaccctgatcacggtggtgttgctggcctctttctttccggccagaggcgatttcgtccccttctttgaaaatctgaccaccgcagctattgccctgctgttctttatgcacggcgcgaagttgagccgtgaggcgattattgctggcggtggtcactggcgactgcatttgtgggtaatgtgcagcaccttcgtgctgtttccgattctgggtgtactgtttgcctggtggaaaccggtaaatgtcgacccgatgctctactccggttttctctacttgtgcattctcccggctaccgtgcagtctgcaatcgccttcacgagtatggcgggcggtaacgtcgcggcagcggtttgttctgcgagcgcatccagcctgctggggattttccttagtccattgctggttggtctggtgatgaatgttcacggtgcagggggcagccttgagcaggtcggtaaaattatgctgcaactgctgctgccgtttgtgttggggcatctttcccggccgtggattggtgactgggtgagccgcaataaaaaatggattgcgaaaactgaccagacgtccattctgttggtggtttatacagcgttcagcgaagccgtcgttaatggtatctggcataaagttggctggggaagtttgctgtttatcgtggtggtcagctgcgttcttctggctatcgtgattgtagttaacgtctttatggcacgccgactgagcttcaataaggcagatgaaattactatcgtcttttgtggtagcaaaaagagtctggcaaatggcatcccgatggcaaacattctgttccccacaagcgtgatcggtatgatggtgctgcccctgatgattttccatcagatccaattgatggtctgtgcggtgctggcgcgtcgatacaaacgccagaccgaacagttacaggcgcagcaggaaagcagcgccgataaagcttaaagcggacgcttcaggggctggaccagttgcgtcagcccctcggttttaatcagcagcgtgatttgcattagctcaccgagcttccctgccgggaactcatctttgcgggcaaaccacagcagatactcctccggcaggtcgattaagcgacgccctttgtatttgccaaacggcattatcgtattggctatttcaatcagctgctctttttccatctcagctacccagcaaacgcagcatttccgcttcgtcgatgacttcaatgcccagttcctgcgccttcgccagtttagatcctgcagcttcacccgctatcaccagatcggttttcttgctcacgctgcccgcgactttcgcgcccagttcgaccagtcgagctttagcgtcatcacggctcatctggcttaagctgcccgtaagcaccacggttttaccagcaaacgggctgtcaatctcttccgcgttgataacgatcggcgcaggccagtgaacaccttccgccaacagctcgctgatgacattgcggttgctttcttcggcaaagaagttgtgaacgtgggatgcaacgacaatgccaacatcaggcaccttttgcagctcttcaatgctagcggcttccagcgcttccagcgtgccgaaatatgccgccagacctgctgcggtggcctcgccgacttcacggatgccaagtgcatagaggaagcgagcaaaggtggtttctttcgctttttccagcgcgttaaccacgttttgtgcgctttttggccccatacgctccagtccggtcagtttgcctgcggtgagtttgaacagatctgccggagtatggacatattctttttcaaccagctgatcgatgattttgtcgcccattccgtcaacatccatcgcacggcgggaaacaaagtgtttcaggctctctttacgctgcgcaccgcaaatcaggccaccggtacagcgggcaaccgcttcaccttccacacgctcaacgtcagaaccacataccggacaatgcgtcgggaatacaacctcacgggtatcttccgggcgttcagaaagcacgacgttaaccacctgcgggatcacgtcgccagcgcggcgaatcaccactttatcgccaatgcgtaaaccaagacgttcgatttcatccgcattgtgtaaggttgcgttactcaccagcacgcctgcaacatggacaggttccagacgcgcaacaggcgtaatcgcgccagtacgcccaacctgaaactcgacgtcacgcacaaaggtcatctgctcctgcgccgggaatttaaacgctaccgcccagcgcggggcacgcgcgacaaagccaagctgctcctgctgtgccagactgttgaccttaatcaccacgccgtcgatatcaaagcccagcgtcgggcggtcttcttccactttgtgatagaacgccagcacttcttccgcgctttcacaaagcgttacccgatcgctgaccggcaacccccactttttaaattgcagtaaacggccaagatgagtatccggcagctcgccaccttccagaacaccaacgccatagcagaaaaaagtgagcggtcgcttcgctgtaatacgcggatcaagctgacgcagactaccagctgccgcattacgtgggttagcaaacactttcccgcccgtgcgtcgcgcatcttcgttaatcttttcgaaccccgcctgcggcaggaacacttcaccacgcacttccagacgcgccgggatattctctccgtgcagcttcagcggaatggcgcgaatagtacgcacattagacgtgatatcttccccggtggtgccatcgccacgggtcgcggcactgactaaaacgccattttcatacagaatactgacggcaagaccatccagcttcagctcacagcaccaggtgactttctcgttgtttttcagacggtcctgcacacgtttgttgaaagcaagaaagctttcttcatcaaaaacgttatccagactcagcattggtacttcatggcgtatctggctgaaagccgccagcggcgcagcgcctacacgttgagtagggctatcaggcgtaatcagttctggatgtttggtttccagctcgcgcagttcgcgcatcagcctgtcgtattcagcgtcgggaatttccggcgcatccatcacatgataaagatattcatgatggcgaagcgtcgttcgcagttctgtcagttgttgttcgatactttccatatcgcaccatcaatgctaaaaacccccgacaagcgggggttcgaagaggagttaatttgccttaagtgtatcaggcgttggcgtctttgacttcgcggatgatgtcctggtactcgcgcaatttctgcggagtcatcatacggcgctgatcgtcaagcacgacaccgcccacttcatcggcaatatgctgcgcagattgcagcatcagcttgaagttctgcagctcgtcaccgtaagacggtacctgcataaagatagtgacacccggagtagtgaaatccttcatttcaggatcaaaggttcccggtttcaccatattcgccaggctgaataacgccgggccgctgccatccgggctaagatgacgatggtaaatattcatatcgccaaaaatgaagcccgcttgttgaatgctgttaagaagcagttcaccgtttagctcgctaccgtgatgcgccgcgacgttcatgataatcaccgcttctttgcgcttcggtttatccataactggagcaggttccgctacaggctcaggctgtggtgccgctacgggttctgcaggctggaaagcctgttgtgccggttgcggtgcactatgcacaggctgcggcgctggcgcgacctgtgggctaactggctgctgcaacggctgttcaggctgcggctgataggcaggctgctgcaccggctgcgctggatgcggagcatgttgcggcggtacctgcgcttcaggcggctgctggaccggttgacgcggctgcgcagacgcataaggcggttggtactggtgttgcgggctcggacgagcagcctcatgctcctgagcgttagccggggcatgattcacgcggtgaacacgaacctcaccaacgccctcatcatcttcgacatcctcgtcataagaatcgtcgtcacgtttactcttcattcgttttaatggccgatcgcggaacatagaagatcgttctttacggctggtccagaaaccatgtaccagtaaagcgattatggcgatcgcgccaacaatgattaatatcagacgcaaatcctgcatcattatattctctgttgttctaacaccttgccaccacggcaaacatttactcactaagagtatttgccgattacctcaagtgcaagtgcactattaactttcacagcacaaagatagatgaaatcgtgctttttgctgttttttcgaacatatcctaactgtccattgcgcaattacccggtaaaatacgcagaattttcctgggattggtcaaaaggagctcatcctgattatggttagtagtttcacatctgccccacgcagcggtttttactattttgcgcaaggctggaagctcgtcagccaacctgggattcggcgtttcgttattttaccgctgctggtcaatattttgttgatggggggcgcattctggtggctctttacacagctcgatgtctggatcccgactctcatgagttacgttccggactggctacaatggctgagttatctgttgtggcctctggctgtcatctctgtgctgttagtgtttggctatttcttctccacgattgctaactggattgccgctccgtttaacggtttattggctgaacaactggaagcacgattgactggcgctacaccgccagataccgggattttcggtatcatgaaagatgtgccgcgaatcatgaaacgcgaatggcaaaaatttgcctggtatctgccgcgcgcaattgtattactaattctttacttcatccctggtattgggcaaaccgtcgcgccggtactgtggttcctgtttagcgcctggatgttagccatccagtattgcgattaccccttcgataaccacaaagtgccgtttaaagagatgcgcaccgccctgcgcacacgcaaaatcaccaatatgcagtttggtgctttaaccagcctgtttacgatgatcccgctgcttaatctgttcatcatgcccgttgccgtttgtggcgcgacggcgatgtgggtcgattgctatcgcgataaacacgcgatgtggcggtaacaatctaccggttattttgtaaaccgtttgtgtgaaacaggggtggcttatgccgccccttattccatcttgcatgtcattatttcccttctgtatatagatatgctaaatccttacttccgcatattctctgagcgggtatgctacctgttgtatcccaatttcatacagttaaggacaggccatgagtaagatttttgaagataacagcctgactatcggtcacacgccgctggttcgcctgaatcgcatcggtaacggacgcattctggcgaaggtggaatctcgtaaccccagcttcagcgttaagtgccgtatcggtgccaacatgatttgggatgccgaaaagcgcggcgtgctgaaaccaggcgttgaactggttgaaccgaccagcggtaataccgggattgcactggcctatgtagctgccgctcgcggttacaaactcaccctgaccatgccagaaaccatgagtattgaacgccgcaagctgctgaaagcgttaggtgcaaacctggtgctgacggaaggtgctaaaggcatgaaaggcgcaatccaaaaagcagaagaaattgtcgccagcaatccagagaaatacctgctgctgcaacaattcagcaatccggcaaaccctgaaattcacgaaaagaccaccggtccggagatatgggaagataccgacggtcaggttgatgtatttattgctggcgttgggactggcggtacgctgactggcgtcagccgctacattaaaggcaccaaaggcaagaccgatcttatctctgtcgccgttgagccaaccgattctccagttatcgcccaggcgctggcaggtgaagagattaaacctggcccgcataaaattcagggtattggcgctggttttatcccggctaacctcgatctcaagctggtcgataaagtcattggcatcaccaatgaagaagcgatttctaccgcgcgtcgtctgatggaagaagaaggtattcttgcaggtatctcttctggagcagctgttgccgcggcgttgaaactacaagaagatgaaagctttaccaacaagaatattgtggttattctaccaagtagcggtgagcgttatttaagcaccgcattgtttgccgatctcttcactgagaaagaattgcaacagtaatgccagcttgttaaaaatgcgtaaaaaagcacctttttaggtgcttttttgtggcctgcttcaaactttcgcccctcctggcattgattcagcctgtcggaactggtatttaaccagactaattattttgatgcgcgaaattaatcgttacaggaaaagccaaagctgaatcgattttatgatttggttcaattcttcctttagcggcataatgtttaatgacgtacgaaacgtcagcggtcaacacccgccagcaatggactgtattgcgctcttcgtgcgtcgcgtctgttaaaaactggcgctaacaatacaggctaaagtcgaaccgccaggctagactttagttccacaacactaaacctataagttggggaaatacaatgttccagcaagaagttaccattaccgctccgaacggtctgcacacccgccctgctgcccagtttgtaaaagaagctaagggcttcacttctgaaattactgtgacttccaacggcaaaagcgccagcgcgaaaagcctgtttaaactgcagactctgggcctgactcaaggtaccgttgtgactatctccgcagaaggcgaagacgagcagaaagcggttgaacatctggttaaactgatggcggaactcgagtaatttcccgggttcttttaaaaatcagtcacaagtaaggtagggttatgattagtggcattttagcatccccgggtatcgctttcggtaaagctctgcttctgaaagaagacgaaattgtcattgaccggaaaaaaatttctgccgaccaggttgatcaggaagttgaacgttttctgagcggtcgtgccaaggcaagtgcccagctggaaacgatcaaaacgaaagctggtgaaacgttcggtgaagaaaaagaagccatctttgaagggcatattatgctgctcgaagatgaggagctggagcaggaaatcatagccctgattaaagataagcacatgacagctgacgcagctgctcatgaagttatcgaaggtcaggcttctgccctggaagagctggatgatgaatacctgaaagaacgtgcggctgacgtacgtgatatcggtaagcgcctgctgcgcaacatcctgggcctgaagattatcgacctgagcgccattcaggatgaagtcattctggttgccgctgacctgacgccgtccgaaaccgcacagctgaacctgaagaaggtgctgggtttcatcaccgacgcgggtggccgtacttcccacacctctatcatggcgcgttctctggaactacctgctatcgtgggtaccggtagcgtcacctctcaggtgaaaaatgacgactatctgattctggatgccgtaaataatcaggtttacgtcaatccaaccaacgaagttattgataaaatgcgcgctgttcaggagcaagtggcttctgaaaaagcagagcttgctaaactgaaagatctgccagctattacgctggacggtcaccaggtagaagtatgcgctaacattggtacggttcgtgacgttgaaggtgcagagcgtaacggcgctgaaggcgttggtctgtatcgtactgagttcctgttcatggaccgcgacgcactgcccactgaagaagaacagtttgctgcttacaaagcagtggctgaagcgtgtggcagccaagcggttatcgttcgtaccatggacatcggcggcgacaaagagctgccatacatgaacttcccgaaagaagagaacccgttcctcggctggcgcgctatccgtatcgcgatggatcgtagagagatcctgcgcgatcagctccgcgctatcctgcgtgccagcgctttcggtaaattgcgcattatgttcccgatgatcatctctgttgaagaagtgcgtgcactgcgcaaagagatcgaaatctacaaacaggaactgcgcgacgaaggtaaagcgtttgacgagagtattgaaatcggcgtaatggtggaaacaccggctgccgcaacaattgcacgtcatttagccaaagaagttgatttctttagtatcggcaccaatgatttaacgcagtacactctggcagttgaccgtggtaatgatatgattagtcacctttaccagccaatgagtccgtccgtgctgaacttgatcaagcaagttattgatgcttctcatgctgaaggcaaatggactggcatgtgtggtgagcttgctggcgatgaacgtgctacacttctgttgctggggatgggtctggacgaattctctatgagcgccatttctatcccgcgcattaagaagattatccgtaacacgaacttcgaagatgcgaaggtgttagcagagcaggctcttgctcaaccgacaacggacgagttaatgacgctggttaacaagttcattgaagaaaaaacaatctgctaatccacgagatgcggcccaatttactgcttaggagaagatcatgggtttgttcgataaactgaaatctctggtttccgacgacaagaaggataccggaactattgagatcattgctccgctctctggcgagatcgtcaatatcgaagacgtgccggatgtcgtttttgcggaaaaaatcgttggtgatggtattgctatcaaaccaacgggtaacaaaatggtcgcgccagtagacggcaccattggtaaaatctttgaaaccaaccacgcattctctatcgaatctgatagcggcgttgaactgttcgtccacttcggtatcgacaccgttgaactgaaaggcgaaggcttcaagcgtattgctgaagaaggtcagcgcgtgaaagttggcgatactgtcattgaatttgatctgccgctgctggaagagaaagccaagtctaccctgactccggttgttatctccaacatggacgaaatcaaagaactgatcaaactgtccggtagcgtaaccgtgggtgaaaccccggttatccgcatcaagaagtaattcttgccgcagtgaaaaatggcgcccatcggcgccatttttttatgcttccgccagcggcggcaaaatcaattcatcgctctcatgctgctgggtgtagcgcatcacttccagtacgcgcaaccccgctcggtgcactgcatcggttaacgccttccctttcagcaagccactgatgagctgagcacaaaacaggtcgccagtccctttcaggtcggtttttacccgactatgggaaatgacattcacgctgtcggcagtgaccaccacaacctgcatctcctgattttcttcattaccggaggcgctggtaaccaccacccattttaatgtgtcactaagcagactttttgcggcagcaatggcactgtcgagatcgcggcaatttttaccggtcaggatttccaactcaaagatattgggggtaattccctgcgccagcggcagtaaatattgtcgatacgcttcgggaaggtcaggtttgacataaattccgctatcaatatcgtcaatcaccggatcgaccatgatcaataggtcaggatggtctttgcgtagcgcagtcagccactcggcaaggattttgatttggcttgccgttcccatatagcccgtggttacagcacgaagttggcgcagcgcatcacgctcctgaagcgcacgcaaatagccgctaaaccattcgtccggaatcgcaccaccgtagaaagtgtcataatgcggcgtattgctcagcaataccgtcggcacggcaaagacattcaggccgttctgtttgatagcaggcacggcaatgctgttgcccacgctgccgtaaaccacctggctctgcacggcgacgatatccgcctgcagtgccctactcttatcgttaaacaacaacaaactactcatttaattttttctccttgccgatgatcctcatcgtaatccaaccgaaactttacctgattctggcagtcaaatcggctatcacaaaacaaggataaggtaattcaatgaagaaaatcatttgtctggtcattacactactaatgacactccccgtttacgcgaagttaactgcccatgaagaagcccgcatcaacgccatgctggagggattagcacagaaaaaggatttgatatttgtgcgcaacggtgatgaacatacctgctatgaagcggtttctcatctgcgtctgaagctcggcaatacccgtaaccgcattgacactgccgagcagtttattgataaggttgctagcagcagtagcattactgggaagccgtatattgtgaagatccccggtaagagcgatgagaacgcacagccttttttacatgcgttaattgcgcagacggataaaacggtgcctgcggaaggaaattaatccgctttgggaaggcatttacaggaggtaacatgaaaaaacgctttatttatcacgatgaaaaaagcaataaattttggtggatagattacgaaggggatagtttagctgtcaactatggcaaggtaggtagtattggtaaattccagacaaaagagttcgataatgaagaacagtgtctgaaagaagccagtaaattgattgccgcaaaaatgaagaaaggctatcaagaagatccaaagtttaacttcatggatcgctactattttgatgatgaagaaattgggttacatgttaaaacgagtcacccaaacttccagtgccattttactgatccactttatatgtgttgctgggatgaagaatctccttttggcagcgatgaaggtgctgatgctctaaacgttcttgaaaatagcctccgtaaagagccggatctggactgtgctgatttccctcaaatgttaattgaaactatgtggggtatgaaatacatcgctatggacagtattcttgaagaggatgttcgtgcgcaattactagtcgatgaaatgagcactatccagagcaatatgattacctacgcaactgcattcggtcagattaaagtcatgggtaaaatctcccataaacttaaaaagatgggactcaatgcactagcgcgtcatcagcttaccgcaaaaattcttcaatggggtgacggtcaggacagtccaatacttcaaaaaatgattgatgaccttacggcgtttcctcacgaaaattaaatactgcatttgtcggcagcaacaactgttaaaaaagtgcgctttgtttatgccggatgcggcgtaaacgccttatccggcctacaaaatcgtgctaattcaatatattgcagaaaccttgtaggcctgataagcgtagcgcatcaggcagttttgcgtttgtcatcagtctccgatgctattaatccttaaatccccgccccctggctaaaatgctcttccccaaacaccccggtagaaaggtagcgatcgccacgatcgcagatgatcgccaccaccaccgcgtcagggttagcttttgccacccgcagtgctccggcaaccgcgccgccggagctgacgccacagaatattccttcccgcaccgccagttcgcgcatggtgttttccgcatcgcgctgatgaatatccagcacctcatccaccagagaagcgttgaaaatccccggcagatattccgtaggccagcggcgaatgccgggaatgctgctgccctcttccggttgcaggccgacaatggtcaccggtttggattgttcgcgcataaagcgactgacgccggtgatagtgccggtcgtccccatgctggagacaaaatgagtgatgcgcccgccggtttgctgccagatttccggcccagtggtggtgtaatgcgcataagggttatcgggattattgaactgatcgagcagctttccttcgccacgattcgccatctccagcgccagatcgcgcgcaccttccatgccctgctctttggtgacaagaatcagttccgcaccataagcacgcatcgccgcacggcgttcctggctcatgttgtcgggcatcagcaatttcatgcgatagcctttcagcgcggcaatcattgccagcgcaatgccggtgttaccactggtggcttcgattaagacatcacccggtttaatttccccgcgcttttccgcctcgacgatcatgctaagtgccgcacgatctttcacgctacctgccgggttattgccttccagttttaaccacacttcactgccgttatccggccccattcgctgcaacttcaccagaggcgtattgcctattgtttgttctaatgtactcacgatctctatccatacgtggtgttgcctgatgcgacgcttgcgcgtcttatcaggtctacaggttacaaaccttgccattaaaaagcccggatcgcgggaagcgcctccgggcgtttaacattcactcaacctatcaggcgctttgtgcgagagcaagttcctcatcgcgggtttcgatacgctcgtcgccgttatacagccgcgcatgttgcagaccaacgaataaacgctcgccacgctgcggggcatcgtcgccatgcatcacgaccgtcagcggttcgttgtaccaccccagcggctgcaccactaattgggtgtagtgacctttcgggctggcttccagtacctgtaccggcagcgggctatcgaggctggtacggcggctgatatccacttcccaagggcgcaggaagagatccaccggcccctgatacgcaggtgtgtagcccagcggccagcgatgcgcgccaacatggaactgcccgccgcgaatggttccctgcaggcggttcacttcgcccataaattcgagcacaaaacggatcgccggttcgcgccatacctgatccggcgcgtcagcctgttcaatattgccctggctcatcacaactacacgatcagctacttcggtcgcttcttcctgatcgtgggtcacaaaaacgctggtgaattttagttcttcatggagttgacgcagccagcgacgcagctctttacgcacctgcgcatccagcgcgccaaacggttcatcaagcagcagaatttgcggttccacagccagcgcgcgcgccagcgccacgcgctgtttctggccgccggaaagctgcgccggataacgatccgccagatgggcaagctggaccatttccagcaattttgtcactttcgctttgatggctgcggcattcgggcgctcgcgacgcggcagcaccgtcaggccaaaagcgatattgtcgaacaccgtcatatggcggaacagcgcgtaatgctggaacacgaaaccgactttacgatcacgtgcgtgcaggcggctcacgtcggtgccgtggaagcgaatatgcccgctggtttgatgctccagcccggcgataatgcgcagcagcgtggttttcccggaaccggacggccccagcaacgcgaccatctgaccactaggaatatccagactgatatcgttcagcacctgggtgcgaccaaagctcttcttaatattggcaatctcaatgctcatgatgttcctcctgctgtgcgcgtttttcctgattctccaggcgccactgcaacatactttttaaaaacagggtgataatcgccatcagcgttaacagcgccgcagcggtaaaggagccgacggtgttgtagtcctgctccagcaattcaatctgtaacggcaggctcagggtttcgccgcgaatgctgccggaaaccacgctcaccgcgccaaactcgccaattgcgcgggcgttggtcaacaccacgccataaagcagcgcccagcggatgttcggtaatgtgacgcgacggaacatctgccagccggacgcgccaagcaaaatcgccgcttcgtcttcctggctgccctggcttaacatcaccggcaccagttcgcgcaccacaaacggacacgtcacgaagatggtgaccagcaccattcccggccaggagaacataatttgcaggttatgctcgtcgagccaaccgccgagcgggccgttagagccgtagaacagcaaatacaccagaccggcaaccaccgggcttacggcaaacggaatgtccagtagcgtcagcagtaactggcgtccagggaagttaaagcgcgtcaccagccaggccagcagaatgccgaacaccaggtttaccggtacggcaatcagcgcgatcatcaccgtcagccagatggcgtgcagcatgtccggatcggccagattctgtaaaaccggcatcagccccttgctgaatgcctgcacgaagatgtaaatcatcggcaccagcaggatgaacgcgctaaccagcatcccgatgccaatcagaaaccatttgccccagttaatcgggcgcgcgtcataacgcttcaattgggtaacttccgccattaatgacctaccacacgccgaccaaagcgactttgcagagtgttaatactgaacagcagcagcagagatgccgcgaggatcacgctagcaatcgcgctcgctgccgggtaatcaaactcctgtaagcgcacaaaaatcatcaggctcgtcacttccgtcttccacgcgatatttccggcgataaaaatcaccgcgccaaattcaccaagactacgggtaaagctcagcgccacgcccgccaccagcgccggagaaagctccggcagcaccactttgcagaaactctgccagcgcgttgcaccaagcgtttccgccgcttcttcatattccgggcctaactcttccagcaccggctgcacggtacgcaccacaaacggaatgctggtaaaggccatagccaccgcaatccccagccatgtataggtgactttgatatcaaacttcgccagccattcaccgtaaaaaccgtttacggaaaagaggctggccagcgttaaaccggcgacagccgttggcagcgcaaagggtaaatccatcagcgcatcaagcagcgtgcggcctgggaagcgatagcgggttaggatccacgccatcagcagaccgaaaacgccgttaaaaatgcttgccacaaacgcgctcagcagcgttactttgtaggccgcgaccacctgcgggttggtgatcacctcccagtactgcgcccagctcatctgggccagttgcatcaccagcgcggagagcggcagcagcaaaatcaggcacacaaacagcagactggtgccgaggcttaaggtaaagcccggcagcacgcgtctggaggagacagcaaacatcagttacgccccgccgctaacagcttgtctaactcgccgccgctggtgaagtgggttttcatcacttccggccaggagccaaatttgtcttccacgcggaacagctcggtctgcgggaatttgtctttcagtttgtccatcacctccgggttattcacgcggtagtaatagtcggtgatgatggtttgcgcctgcgggctatagagccagttcagataggctttggcggctttttccgtaccgttggcctgcacgtttttatcaacccacgccaccgggaattccgccagaatgttggttttcggaatcaccacttcaaagccctgcgcttcatactgtttacggatgttgttcacttcgctttcgaagctaatcagcacatcgcccaggccgcgctcggcaaaagtggtggtcgcgccacgaccgccagtatcgaacacttcaacgtttttcaggaactgggtcataaactgttcggttttgcctttgtcaccaccgtcagctttatccgctgcgccccatgccgccagataggtataacgcgcgttaccgctcgttttcgggttcgggaaaatcagcttcacgtcggagcgcaccaggtcgttccaatcgtggatattcttcgggttacccttacgcaccaggaagcccatggtggagtagaacgggctgctattattcggcaggcggctctgccagtcggccgggatcagcttgcctttatcgtgcaggatttgtacgtcggtcacctggttataagtgacaacgtcggcttttaagccctgtaaaatcgccagcgcctgtttactactcccggcatgagattgttttatcgtcagtttgtcgccgccgttatcttttgcccattgttgctcaaacggcggattcagggcggcaaacagctcgcgggagacgtcataagaactgttcagcagttccgttgcctgtacatggcccgccagcagcagagaagcgaccagcgcgagactgttctttttcagtaagttaacggccattgcgcacccttataaatttaatgactttctaatagccatcatatttataacggacgtgaaaggagtaacggttttatataccgtttggtgatttggaagttgaaaagggaataagaacttggttcaacaggcgtaattgttgcagtcagtttggacacgaacagcgcggagaaaccggagcgtacacatagtacgtgaggatttcgagcactgcccggggccaaaatgacaaataaaatagcctggtgaacttagttcaagacgaaatcctccccacaaatgcagggaggaaacagaggtgaatcagataccgacgctaaccgtctccggcagtgtgctgccgccatcaatcacattctgtgtaccggttaaatagctggattcatcgcttgcgaggaaggccgccagttcgccgacttccagcggatcggcgaggcgacgcatcgggattgctttcgccatttcagtcagcacgctctctggatcttccgggttgctctggcgggcaatgctttccgccattggtgtgcgcacgtatcccgggcaaatggcgttaacgcgaataccagactgcgcgtactccaccgccaggctttttgtcaggccaacaatcgccgctttcgttaaggcgtacgccgtttcgccaggatcggccaccatatcaccagtgacactagacatcatcacaatgcgaccatctttgcgggcaatcatctccggcagcaccgccttcgtgacgttccatacgcctttaatattgatgtcaatatggaaatcgcgatcgtcatcgctcatatcgaggaaactgcccagacgacaaacgcctgcgttattcaccaggatatcaatgcgcccttctttttccttcgcgcgtttgatagctgcggctacgctcgccgggtcacgcacatcggcgacaaccgccgtacagcgatgaccacgaccacacagttcgtccgccagcttttcgatctcaggggagatatccagcaagattaggttcgcgccatgacgtgcaaaagttctggcaattccttcgccaattccctgcaatgcgcccgtaatcagtgctgtcttgcccgtgagtttacccattttaatgctctccttgttaatacagagcgttacactccattccctctgaaaatacaggataaacaaaatattgctgcggatcagctcactaattcaggaaaatctcaatccagtcgctgctttatgcatcatttcaggcgttgtgttagctcactgctgcgctgaatcattttcaaactctccacatcattgagttgcacaaggccaacaaacagtaaatcggtaacagaattttgcgccgtgcgggtagacatgctgctgctacgccattcggtttctccggaaacggtatcgagggtgaaatgcgccagccgccgcagcggagagtcagtcagagaagtaatggcaatcaccgttgccccctgctttcgtgccgcttctgcgcacaagacaatctcttttttactgccgctgtaagagatagcgatttgtacatcgccttttttcaacgcctgagaaacggtggcttgtacgtgcgtgtcggcttcgcaggccacgcgatagccaattttcatcagtttgaagctcagatcgcgccccaccagcgcgcttccgcccaggcccgttatctggataaacggtgctttactgatgacctcaatgattttttgcagccgcgcgtaatcgagcaacgcgcaggtttgctccagcgccagctctttttcgcgattcagtttgcgcgcgatcacttccaggctatcatcactggtaatgctactgtgcaggtgcagtgccgtggcattcgttttctcccggctggcactgtattcgcctattaacgccatacgcaattcagtaaatccttgcgcgccgagtttttgggcaaatttcactatgctgctctggctaatgccgagctgtttcgccatctgccgactagaaacggattgcagctcactcacgttggcctgcagaaagtcagcgattttttgctcgttttcggtgaattcactccccgcattgcttattttcgtcaggtacaacatcttccactctcctgggctggcagcataaattccgcttaagttcttatgacgctcttcacactctgcgagtgtagactcaatgattcctttaagcctgtcaattcgggatatatgattccatacatctgcaattatttgatcgtaaatagtaaggtcaccaccgatgcaatttgaaaagatgattactgaaggcagcaacaccgccagcgctgaaattgaccgcgtaagcacgctggaaatgtgccggattatcaacgatgaagataaaaccgtaccgcttgccgttgagcgcgtactgccggatatcgccgcggcgatcgatgttatccacgcccaggtaagcggcggcgggcgtctgatttacctcggtgcgggaacatccggtcgtctggggattctggatgccagcgaatgtccgcccacctacggcgtgaaaccgggtctggtggttggtttgattgctggcggcgaatatgccattcagcacgcggtggaaggcgcggaagatagccgggaaggcggtgttaatgatctgaaaaatattaatttaacggcacaggatgtggtggttggcattgctgccagcggtcgcacgccgtatgtgattgccggactggaatacgcacgccagctcggctgccgcacagtgggaatttcctgtaatccggggagcgccgttagtaccaccgctgagtttgccattacaccgattgtaggtgccgaagttgttaccggttctagccggatgaaagcaggtacagcgcagaaactggtgctcaatatgctttccaccgggctgatgattaaatccggcaaagtgttcggcaacctgatggtcgatgtggtcgccaccaacgaaaaactgcatgtgcgacaggtcaatattgttaaaaacgccaccggatgtagcgcagagcaagcggaagcggcgttaattgcttgcgagcgcaactgtaaaacggccattgtgatggtgctgaaaaatctcgatgccgcagaagctaaaaaacgcctggatcaacacggcggctttattcgtcaggttttagacaaggaataacccatggccaaagagatcagcagtgaacttctgaacaccattcttacccgtgtcggcggaccgggaaatatcgccagttgtggtaactgtatgacgcgcctgcgtctgggtgtacatgacagtagtctggttgatcccaatatcaaaacgctggaaggcgtgaagggcgtcattttgaccagcgaccaggtgcaggtcgtttttgggcctggtaaagcgcatcgtgccgcaaaagcgatgagcgagctgctgggagaagcaccggtacaggatgccgcagaaatcgccgcccagaacaaacgtcagttaaaagccaaacaaacctccggcgtgcaacaatttctcgccaaattcgccaccatcttcacgccgctgatccccggttttattgccgccggtctgctgctggggatagcgacgttaattgccacggtgatgcacgttccggcagatgctcagggaacactacccgatgcgctgaattttatgaaggtgttcagcaaaggtttgttcactttcctggtgattctggtgggctataacgccgcccaggcatttggcggcacgggcgtaaatggcgcaattatcgccgcgctctttttgctcggttataaccccgcagcgaccaccggttactacgccggttttcacgatttctttggtctgcccatcgatccgcgcggcaatattatcggcgtgctgattgccgcgtgggcctgcgcccgcattgaaggcatggtgcgccgctttatgccggacgatctcgacatgctgctgaccagcttaatcaccctgctgatcaccgctacgcttgcgtacctgatcattatgccgctgggtggctggttattcgaaggtatgagttggctgtttatgcacctgaacagtaatccgttcggttgtgcggttttagccgggctgttcctgatcgccgtggtatttggcgtgcatcagggctttattcctgtttacctcgcgttaatggacagccagggattcaacagcttatttcccatccttagtatggcaggcgcgggccaggtgggcgcggcgctggcactctactggcgggcgcaaccgcacagtgcgctacgcagtcaggtacgcggggcgattattcccggcctgctgggcgttggtgaaccgctgatttacggtgtcaccctgccccgcatgaagccgtttgttaccgcctgtttaggcggcgcggcgggcggtttgtttatcggcctgatagcctggtggggtctgccgatgggcttaaacagcgcctttgggccgtctggtctggtagcgctgccgctgatgacttccgcacaaggcatccttccggccatggcggtttatgctggcgggattctggtggcatgggtttgcgggtttattttcaccacgctctttggctgccgtaacgtcaatctggactgatatcatgaaacggacaatgctctatctttctctgctggctgttagttgtagcgtcagcgccgcaaaataccctgttctgacagaaagcagcccagagaaagcagggtttaacgtcgaacggcttaaccagatggatcgctggattagccagcaagttgatgtcggttatcccagcgtaaacctgctgatcattaaagataatcagattgtgtatcgcaaagcctggggagcggcgaaaaagtacgatggcagcgtgttgatggaacagcctgtcaaagccaccaccgggacgctgtatgacctggccagtaacaccaaaatgtacgccacgaacttcgccctgcaaaagctgatgagcgaaggcaaactgcatcctgacgatcggattgcgaaatatattccggggtttgccgatagtccaaatgacaccattaaaggcaaaaacaccctgcggatttctgacctgctgcatcacagcggcggtttcccggcagatccgcaatacccgaataaagcggtcgcgggcgcgttatattcccaggataaaggccagacgctggagatgatcaagcgcacgccgctggaatatcagcccggcagcaaacatatctacagcgatgtcgattatatgctgcttggatttatcgtcgagagcgttaccggtcagccgcttgaccgctatgttgaagagagcatttatcgcccgctcggcctgacacatacggtatttaacccgctgctgaaaggctttaaaccgcaacaaattgccgccacggaattgaacggcaatacccgcgatggcgtgatccatttcccgaatatccgcacctccactctctggggtcaggtgcacgatgaaaaagccttttatagcatgggcggcgtttccgggcacgcaggtttgttttccaataccggcgatattgcggtgttaatgcaaacgatgctgaacggcgggggctatggtgatgtgcagctgttcaatgcggaaacggtgaagatgttcaccaccagctctaaggaagatgccacttttggcctcggctggcgcgtgaatggtaatgccaccatgacgccgacgtttggcacgctggcaagcccgcaaacctacggtcacactggctggaccggaacggtgaccgttatcgatccggtgaatcatatgacgattgtgatgttaagcaacaagccacatagcccggttgccgatccgcaaaagaatcccaatatgttcgaaagcggtcagttgccgattgcaacttatggttgggtagttgatcaggtgtatgcggcgttaaagcagaagtaataaaaaggccagtcagtaatgttactggctggtctgagagtgctgacaaacgcaaaactgcctgatgcgctacgcttatcaggcctacgtggagcccacaatatattgaattagcacgatttcgtaggccggataaggcgttcacgccgcatccggcgtgtacaacgcgcacttggtcaacaatctgaggccagtcagtaatgttactgcctggcctttaatcaatgaatcagaaacgcttacagcgccatcaacttgtccaggctcggtgcgaaataatagccgccggttaccggtttggtgaaacgcaacatcgcatcacgcttaccatcggtatcgccaaacatgctcagcagttgctgctcaatgttatgcagacgcgcgcagtaggcgcagaagtacagaccgtgagtgccactggcagtgccgtacggcaggctctggcgaacaatcttcagccctttgccatcttctttcagatcaacgcgggtgaggtgagaggtttccggacgttcgtcgccgtcgatctcttcgttggcctctttggtgcgcccgatcaccatctcctgatcgtgaacgctcatccggttgagctgcttcaggttgtgttcccaacgctggacaaacacatagctgccgcccgcatccacgccgtctttgataaccgccacttcgcgacgcgtctcttcacccgccgggttttccgtaccgtcaacaaagccgctcaggtcacgctcttcaacccaacggaagccgtggatctcttctttcacttcaatgcagtcaccaaaggcttccatcgccgcctgggcgacagagaagtttacgtcgtgacgcagagaaagaatgtggatcaacacatcgaactgggtcgtcggcgcaaggcctttaccgtagcccggaaaatctttcagctcttctgccccaacgccgccgctcagagcgcgccaggtgttgttaccaaaggcaaccaccgcaccaagatgcgcgtccgggaatttcgcttcaaaagttgccagtttgtcggcaaatgttttactggccgcacgcagggcgtcaacttcccctttcacgttggcttcgatccaaatcgccgcgcggcaatgttctggcaaaatgccactctgaacctgagacattgttcctcctgaaaataataatgccacgcaatccgtggcattgttgagcgctattttacgtgttttttcgcggcggcggtttgttcagacgcaaattaacgccgccagataattttactgactttccagtttttcagggtatcgtcgctaggcattaacccttcaggaccacgccattccccgctgaactggtagctaatatgttgactgccttcggctttacattcgacggcacgattatcatcaccatcagctttttggcaattgccaaatgctttgctgtaaaggtcgctaaacggtgtaccgattttaacaccggtgtcagcaggaatatcgctatccagcacgtcaatgcgactgatcgtgccttgatcgccgttaatcaccatcgccacgttgtcgcccttcatcacttcaaaaaagcgcaccacgttgccgttcgcggttttcattccgctgcgcaggcgataatcgccatcaagcgcatcggcaatggcttgttcttgcagtggtgtggacgccgttaattcacccacgccctgctcgctcactttggtggagctcccaaaccagttccacgggttagcggcagaccagttaacactgctcatcgtggaacagccggtcagcatcaatggcatagcgcataacattaaacgcaggcttttcatgtcacttcctttggttattcaataacgttgcttggagtgcaaattcaccaaaaagtgccgttattcttttacttcataaaaacaagcgcgtaaacgtcgattggtcagcagccagattaacgccacaatatccgccactaccagcgccagaccgataccgctaacggattcaccgttcagccacagccacggttgccagcaaagtaaaaccacctgcgccaacagcaacagaaaatagagtacacgccaggtgcgaggaaacgtagcccgccgaccgctcaacaaaaacgccagcaccgccggaatgccaggaatcagccccagccagaaattatcgtgatcgggataaaacagatttagcagcgcagtaccctgctcgcggctcgcaccggcaatgacaaacagcacccaggttcgcgcctgaagcaatagcacaagccagaagagcaagggtaaacgcaggcgaccgtgcgcatcataatggacaggatgaaactcagtactcttcatcttcaatcaaacgcttacccagactcagcacgtcggcgtgttcatatcccaggcgttcatacattccgagcaccatgtcgttatcttccggcacattgatctgaattttcgggcagccacgagcaatcagctttttctccagccgattaagcaacgcattggcaatcccacgcccacgaaactctggatgcacgccaagataataagcagacccgcgatgcccgtcataaccgcccatcaccgttccgaccacgtcaccgtttacctcagcgaccaaaaacaaactgacgtcatggttcatcttacgctcgatgtccatttccggatcgttccacggacgcagcaagtcgcaacgctcccaaagggtgatgacctcttcgaaatcttcctggcgaaatacgcgtatctccatggtattcgttacctttttgcgggttaaaaggctgattatggcgtgaacggtcgaattagccaatatctgacgaaaatcggttgaaaaagtggcataatggggagttgtcaactattgaaatgaaaagtaaaacaattctcaacagcaaaccgtcgtaacggattacgcgatacgatataacatctggaactttattattacaactcaggccgtatgagcacttttaaaccactaaaaacactcactagccgccgccaggtgctgaaagccggtttggctgccctgacgttgagtggaatgagccaagccatcgccaaagacgaacttttaaaaaccagcaacggacacagcaagccgaaagccaaaaaatctggcggcaaacgtgtcgttgttctcgatccaggtcacggcggaattgataccggagcgatcggacgcaacggtagcaaagaaaaacatgtggtgctggcgattgctaaaaacgtccgttccattttgcgtaatcatgggattgatgcgcgtttaacgcgttctggcgatacgtttatcccactttacgatcgcgttgaaatcgcccataaacatggcgcagatctgtttatgagtattcatgccgatggctttaccaacccgaaagctgccggtgctagcgtatttgccctctctaaccgtggggcaagtagcgcaatggcgaaatacctgtctgaacgcgaaaaccgcgccgatgaagttgccggtaaaaaggcgactgacaaggatcacctattgcaacaagtgctgtttgatctggtgcaaacagataccattaaaaatagtctgacgctcggcagccatattctgaagaagattaagccggtgcataaactgcacagccgcaacaccgaacaagcggcatttgtggtgttgaaaagtccgagcgttcctagcgtgctggtggaaaccagctttatcaccaacccggaagaagaacggctgttaggcacggcggcgtttcgtcagaaaatcgccacagcgattgctgaaggcgtgatcagttatttccactggttcgacaaccagaaagcacatagcaaaaagcgataagttatgaaacccgacgcacaccaggttaaacagtttctgctcaaccttcaggatacgatttgtcagcagctgaccgccgtcgatggcgcagaatttgtcgaagatagttggcagcgcgaagctggcggcggcgggcgtagtcgggtgttgcgtaatggtggtgttttcgaacaggcaggcgtcaactttagccatgtccacggtgaggcgatgcctgcttccgccaccgctcatcgcccggaacttgccgggcgcagtttcgaggcgatgggcgttagtctggtagtgcatccgcataacccgtatgttcccaccagccacgcgaatgtgcggttttttattgccgaaaaaccgggtgccgatcccgtctggtggtttggcggtggcttcgacttaaccccattctatggttttgaagaagatgctattcactggcatcgcaccgcccgtgacctgtgcctgccatttggcgaagacgtttatccccgttacaaaaagtggtgcgacgaatacttctacctcaaacatcgcaacgaacagcgcggtattggcgggctgttctttgatgacctgaacacgccagatttcgaccgctgttttgcctttatgcaggcggtaggcaaaggctacaccgacgcttatttaccaattgtcgagcgacggaaagcgatggcctacggcgagcgcgagcgcaatttccagttatatcgtcgcggtcgttatgtcgagttcaatctggtctgggatcgcggcacgctgtttggcctgcaaactggcgggcgcaccgagtctatcctgatgagtatgccgccactggtacgctgggaatatgattatcagccaaaagatggcagcccagaagcggcgttaagtgagtttattaaggtcagggattgggtgtaactccctcacccccactcccgcatccgctgatgcagcgtcagactcggcttctcggaaaacagctgctggtaatccgtggcaaattgccccagatgccagaatccccactgcatggcggcgtcttttaccgtcatactttggctccacggacttatcagttcgcggcgtacggcgttcaggcgaatgcgtttcagccacgcgttcgggccaatgcctaaaatagcgtgaaacgcgttttgtagcgtgcggcggctgacatgcagttgattacacaaatccagcaccgtcaccggttcggacatgttttccagcacatattcacgggcgcgggaaagcaatcgacggtaactctgatgactgatgctttccgccgtcaccattggttgcgcttcttccagcatggcccccatcgccattagcaaattatcccccagcacttttcgcactgcaggctgatggagattttccggattctcgcaaaacgtcgccagcgcctgttggacaaagccccacagcgcggctttatgctgctctttcacttccagcgcgctctggttacgcaacatatgtaatacccgatccgggttatgcaaaaagttagcctgccgggtgatgacatcttcagaaagcaccacgcccaggatcgtgtaatcatccggcgtgctcagttcaaattcagtgccaccagggcgggtggcgatttccgcgcttcccagacattggctaccgataaatccctgctcaccgcgcgtcgccggaatgccaaaccagaagctgttcggccagaccaggcagctctgacgcagcgccagaccggtgtattcacgaaaaacctgaatatcatcgagtagaatttccgtaaattcaccatgaaacttgcccggatgcagctgatcgtaaatctgctgccaggcggtaatcgttaaagcatgttcatagacatccgttgtctgtcgttgatgaacattatccacttcgaccttcggcgtgagcttcaggttttcgggtaagggttcatgataaagatggtgcaaattggctgtacgggtctttttcatgatgttaatgccgggtgttgtaggacacccggcacctccgacaggttaatggggcttgagacgataacgactactgcgtttacgtaacgtcccggcagaaaagagctgttcgagcgcatttctggctttttccagcggccagccaaagtgggcagccacttctcctgccgtcattccctgacgtacacttgttaacagcgccaacaactcgtcagcagattccgcgacgataactggcgcgtcgggttcccttacgggttgcttcggctggcggttaaagccagtaaccagccactgggtgtcatcgtctggccgaccgatctccttgcggctgatgacacgcccggtacgcatcgcggcagcacaacctgcgtccagcgccgcacgacacgccgccagatcgccttccaccaccagcgttaagcgaccagggtcaagcacttcgtgactgagcagacgaacgttagctgctttgagcatggcatccgctgcatctatcgcggcgaccatgccgtccacttccagcaatcccagtgcattgatcatcggcaacctccgttacgcacgctggattggattacgcgcgatttccagcactgcatcggtaaaggcgttacaggctgctttacacgctgcctggctaccggttaaaaatgctgcgctgtagttggtttcagacggtggcgggacataggtcgccagctgtacgtcggcagacttcagggctgcatcaatgccataggtcgcttccagcggcggtgccaccagatacgccatcggatcgccaagcgtgatcccggcggtactactgagataagaaccggtacggctaactacatgtgccaggaatgccgtatcttgcgcgtcattagcccactggaaagctgcgccattttcaatatgcgcaatcatcgcatccagacctgcacgcacttccgccgggtttggcccaccaagcataatcagcacttcaccggcagtcggactcgggccgtgtgcagcgcccgcatataggctgcggccatacaccacttccaccatcgcctgcttggtcgcttcatcagcggcaatgtaggtgacgtcatcggagtcggcagaaatcagaccgaggctacgaatatgcggcggcaatttcagttcacgcgcaaaatcggcgttaacggaggcaatcacccgcatagcggtgacagacggtcgaatcaaatctaaagctggcatgatgcctccttatcgggtcatgttgatgccggatgctttctgctccagcatacgtttcgccaaatccacaatgacggctgcggcttcaaccggcggcgtgccgccctggtgaatgttagagatacaggtgcgatcggcctcaacggtggtcgccatacgcgggctgtaaacggcgtagcaggagaggctttcactctgacccaaccccggacgttcgcccaccagcaggatcactactttcgcgccgaggatctcaccgatctgatcttcaatcttcacgcgaccataacgaacaaagaatggtgtaccgactttcagcccggcctgtttcaggcccgccatcagcggtggcaggatctcttcgtagttcacggtgatcgcatcagtactcaggccatcagaaataacgacctgtacgtccggattggcaacacactgcgctttcagcgcttcaacagcttctgcacacaggcggcggcccatatccgggcgagtcaggtagagatttttgtcgctaatttcagagcgtacttccagcaagccctgcgctttcacccactcttccggcacttctttcagtacggtatctttgctacgagagtgatcggccaggaaacgcagcagcgcctgcgtacgtggacgcggaccggcacgaccggtacaaacgcgggccacggtgctgcggcgcagttctgttaatacgtctgcgcgatgcggattttcaacaccaatccacgcttttgcttcagcggaacctaaatccagcgcacagctttcgctggtcaccggtgccgcacagttggtggtggcgcactttgcttcactcggcgcgggggccgcttgtcccatactcgccatcacgctgcgtacaatttcttcaatctgtttttgatccatgatatgttatctccgcgtcatcagaagaacagactcggatcgcccgcccgtttggtcaggcgaccgtttgccataatgcccatgctttccagccagcgttcaaactccggactcgggcgcaggttgagtaactgacgcacagtggcggtatcgtggaatgcggtggtctggtagttgagcatgatgtcatcacccagcggcatccccatgatgtagttgcagcctgcggtggcgagcaggatcatcaggttttcgttgaggttctggtcagcgtcagcgtggttggtataacagcagtcacagcccatagagatgccgctcagcttgcccataaagtgatcttctaagccagcacggataatctggcggtcgttgtagagatactccggcccaataaagccgaccacggtgttgacgataaacggatcgtaatgacgcgccagcccgtagttacgtgcttccatcgttacctggtctgcgccgaagttagcgccagcggatagcgcagagccttgtccggtttcgaagtagaggcagttttccccggcgatacggttgaactccgcgcccactgcgcgcgcttcgtcgagcatcgccagctccacgccaaactctttcagccctttttcgctgccacagatactctggaaaatcagcccgcccggtgcgccacgacggatcgcttcgatctgggtggtgacgtgcgccagtacacagccctgagttgggatgttgaatttgtcgatcacgccatagatggtatccaacacgcggcttaagttttccacgtcgtcagtcaccgggttaacgccgatcaccgcatcgcccaccccgaaggaaagcccttcgtagatttgcgcggcgatactttgcacgtcgtcacgggtgtcatttggctgcaaacgggcgctaaaggtgcccggaataccgatggtggtattggcctttttgattaccggcattttcttcgcgccgtagatcaggtccgcgttggagcaaatcttcgctaccgccgcgaccacttcgctggtcagccctttgcgggtaaaggcaatgtcgtccacgctggtttcatcgctcagcacatactcacgcagttcgctgatgctccagtttttaatctggttgtaggccgtttcgttaacatcgtcctgaatcagccgcgtcacgcagtcatcttcataggcaatcaccggattattgcggatgtccgctacggtcatttcgctcaacacctgctttgccgccacgcgctcctgactgcttgccgctgcgacgcccgccagcacatccccgctacgcagttcgttggctttagccagcacctcttttacatccttaaactgatatacattgccgaacaatgtggtctttagtttcataagtcgttccctcaggaaggaaatgcgagacttttcaccgtcaccggcacaacgcttccgccaaaaagaggcgtaccaatgtcgatatagtcccccgcgcggacaatcacttcgtcaatgactgccaacgggagttgttgtagctgtgggcgcaacaacatgcccagagctttaccaaagtcctgcccggccaccaccagcaggggatgcggattcggaaaacgcgcgacgaaatcgaccaacgcgttgatgaccgtcagtaccgcggcgtaacgcacaggcaggctggcgggaagcgccagcacgtacgcgtcagttttgggatcaagatccagctgaatcagcgcctgttgccaggcccccaccagatccgtttcatcaatcgggatcgccaccggcaaattgcgcagcggcagttgtacgccctcaagccagattgtgctgccagagaggctaagggtatgcgcgcccgcgccaatcaccgtggcgcgcacggtttgcgccggaaactgtacgttcatctcacgcaggcgcggatggtcatgcagcgcagttgccagcagcgggccaatatcggcaaaacagaacgggtcggcgggctggtggcgataacattcgcccacgccgccagaaagcgtaatgatttcgggcgtaacacctgcgggcagcaaaccggtttgcatcaatgcctgcgcgagcggactgagcgttccgtcaatcacttcgacaatcagttctgccatccgccgggtcacctgcaccagctgcgcgccggtcaggctacgggcgtcggtgcctgcaccgaagcactcatccacaatcatctgccccggtttatgagcgtaaaccacgcgcccgtggctgtcggtttccagcaggcgaccaccgacgttgaggcaggcagtgccgctgatttttccggcatcgaacagggcgtagttcgcggtgccaccgccgatgtcgatattcagtacccgacacagccgttgttcagaaagggtttgtgccccggctccgtgaccggcgatcacggattcgaggtgcggcccggcgctggcaacgacaaaatcgcccaggctctgagagagcgccatcaccgccgggcgagcattgcgggttttcgcgctttcaccggtgatgatgatggcaccagaatcaacgctttccggctcaatacccgcagcatgatattgctcgagtattaaggttttcagttccgcttcttttaaaccgccctgtttatcgacaggggtaaagaacaccggactttgccagctaatttcgcgtttaatgaattcgtagcgcggcacctggctcaccgccgcacggttaaccagctccagccgggagaaaatcacctgggtggtggtggtgccgatatcgataccgacgctcaatagctggcgagtgttcacgattgtgcctccgcttcggtttaagtcagctttgtgcctccgcttcggttttagtcgcggtcgcgtcttcttttggcaccagcatcatcgccacgccaatcgccgttacgccgccgatcaacttgccgacaatcatcgggaagatcatggcgttcatgttggcagcggcgaagcctaagtggtcgcccagggcgaaagcagcggaaacggcgaaggcgcagttgatgactttgccgcgggtatccatctgcttcatcatgccgaacatcgggatgttgttggcaagcgttgccaccatgccggctgccgcgatgttgttcatattcagtactttaccgacgctcatcagcggtttttcaaaccagcgagtcagcagcagcaccatcggatacgcccctaacagaacgcaggagatagaaccgataacttcaatggcgcgcatcacctcaccgggtttatcgccaggggccataaagataggatccagaccggggatcagttcccagccaagcaggaatttcactaccgcagcggcaagaccgagggtgatcaatgcaacgaggaatttggcgaagatctggaagccgttgatcattttttccgggatgaatttcagccccagcgccaccagaatcgcaacaatgatcaccgggatcatgttcatcaggatcagggcgaaagtgaattccaccggctggccgttgatctgcacaccggagtacatagcaaccagaccaccagcgatacaaccaatcggaatggtcacaatgcccgccagcacgccgagcgccagataacgacggtcagaaggttcgataatgccgagcgccaccggaatggaaaacacaatcgttggccccatcatgctcccgagaattaacccagagtatagccacgcggctacgtcgccgcccgccagctctttggcgaggaagaagccgcccatatcgcacgccagcagtgttccggcgaacatgcttgggttagcgccgagcatttcgtaaaccggaataattaccggcccgagaacgtgagccagtaccggtgccagcgcggtcataccgaccatcgccaggcccagtgcgcccattgccataaagccttcttcgaactgaccgccacttccttcgatacttttaccgaacttaccgaggaaacgagcagaaccgccgaactggctcaggatcctgtctacggcagctatcagcataaagaacatcatgatgtacatgatgatttcgttaattcccatcgcctttactccctgttagttgttatttattggcggatgcggcgtaaacgccttatccgccctacatgtgcaatcccgtaggctggataagacgcggcaagcgtcgcatccggcaattgcaccgcgccactggcggatgcggcgtgaacgccttatccgccctacatgtgcaatcccgtaggctggataagatgcggcaagcgtcgcatccggcatttattgcgccgctgcgtacaggccgacaatctgctccaggctggcggtacgcgggttactgcgcagacaaatatcttccagcgcggcctgcgcccatgcgccgtaatgcgcagatgtcgcaccaacatcgcccagtcgtttaccaatcccaacttccgcaatcagctcacttaccgcgttaatagcgtcacgatcgtcggattttttagttcgcagtgcccgaccaatctgactaaagcgttcacgacaaaccatccggttaaattccatcaccgttggcagcaacatggcgttcgcgagaccgtgcggaatatgcagcgccgcgcccggctgatgcgccatcgcgtggcacaacccaagacccgcactggaaaacgccattcccgccatacaactagccagcaacatgctctcgcgcgcggcaaggtcgtgaccgtagcccaccgctttcggcaggcttttgccaatcatcgcaatggcaccaatcgccagactgtcggtaaacggtgtagcgttcagggcgctgtatgcttcaatggcatgggttaacgcatcaatgccggtcatcgccgtgacatggctcggcacaccttcggtcaatgcggcgtcgaggatcgccacatccggcatcaggctggcatgggctaacacctgcttgcgcccgctcaccgcgtcgataatcaccgttacattggtggtttcagagccggttccggcggtagttggaatggcaatcagcggcaagcgcggttgcagaacgctggtttcactcatctctgccagcgtgctatccgggttcgtcaccagcaacgtcacggctttcgccgcatccagcacgctgccgccgccaaacgcgatcaccccatcacagccactctcacgcaactgcgccacggctgcacacacgtcggtaatgcacggttcgcccaccggacatggccagagcgtcatggcgatacctttaacggtcaggctacgcgtcagcccggcggtcatccctgcctgatgcaaaaagctgtctgccatcacgaacagatgtttcagcccacgcgtttgcgcttgctgtccgcaactgctcacgctgcccggaccgcaaagcgtcaccggtggaacgctaaatgtttttacccgttgcagattcagggtatcgaacgcctgaaagagcgcggtctgcaattcattttgcatatagcccctccgctttctctcgcccactactggcgatcgccagcggggtcataaacaaactgtgctgcggtaaatgcacctgtaacgccgggaattgtttgcgaaacagttccgccacgcccggttgcatacaagagccgcccgccagccataaatcagtaatgccctgcccttcaatatgccgggcgacaatgtccgccattttttcgtacaccggtttcaccgcaggccaaatctcttcaccgtgaccgcgcttgtactgctccgcctcttccaggctaatacggcgatttccggcgagagtcagagagatgtgatgtccgccggtggcttcatccgcgctgtacgtcaccttgccctttttcacgatggcaatgccggtagtgccgccgccgatatccactacaccggcgttgtccagttgcagcagatccgcaactgcggttggctcatccagcacatggctcacttccagtccggcagattccagcacgttgatggaaatacgcgggtccgtacctggaggaaaactagtcgccgcatggctaaaacgacgaccgaattgctgctcgagcgtgtcgagatggcgacgaacaatggtgacagcgccgaagaaatcccagacgatgccgtcgcgaaccacatcggcccagtcgaggcataccgccactggctgaccgtcgcggtcgacaaccatgctcaccacatcgcaggtgcccagatccacccccagccacagcggagattccgtcgcggcgggcgtctggttacacagcgttgccgccgtttgcagacgtggggtgagccattgttcgtcgtgcgccatctgttactccttaaacaatgcgaaacgcatcgactaatacacagcgacgcagacggacaaacgtacgcgcgctggttaccccttcaccggttggcgtggtgatggtcatggtggtccagccttccccgcccagccccagcccggcaatgcacggtccgttcttaacgaaaatgctggtatcaatagcattcgccatctggttcatgttttcgatgttgcggctgtgcattgccgccgtgtggtggcaaccgccttccagtttcaccgctagcgcaatggcatccgccacgttggcgacgcgcacgacgggcaacaccggcatcatcagttcagtcacggcaaacggatgttctgcggtggtttccacaaacagcaggcgcgtttcttgcggaactttaaggccgattgccgccgcgattttgcctgcgtcgcgaccaacccagtcacggctgacggtgccttttccgcgctcgtcgatatttttcagcaacaccggttgcagctgctgcgcctgttctgcggtcagtttcaccgcgtgctggccttccatcagacgcatcagttcatcggctacgctatcaacaacaatcagtaccttttcgtcggcacaaatgatgttgttatcgaaagaagcgcctttgacgatggactgagcggcacgggcgaggtcggcggtttcatccaccactaccggcgggttgccagcgcctgcggcaatcagacgtttattggtgtgtttacgcgccgcttctactaccgcttcgccgccggttaccaccagcaggccgatacccggaaacttgaacaagcgttgcgcggtttcgatatccggatttgccacagtaaccagtaagttttccggcccacctgcggcaacaatcgcctggttgagcagcgtaatcgcccgctgggagacttttttcgccgccggatgcggggcaaaaatgacgctgttgcccgcggcaatcaggctgatggcgttgttaattacggttgccgccgggttagtggaaggcgtcacgctagccaccacgccccagggtgcgttttcaattagggtcaggccgttgtcgccagtcagcacttgcggagagaggcactcaacgcctggtgtgccgcgcgcctgagcgacgttttttgcaaatttatcttcaacgcgccccatgccggtttcactgacggcaagttccgctaaatctctggcgtgtttttcgcctgcttcacgaatggcagcaatggctaactggcgcattgccacgctttttaacccttgctgggcgactttggctgccgcaacggcgtcatccagggacgcgaaaacgcccatctcatgaacggcggcggacggcgtgtcactgctttgcattttcagcagtaccgctttcaccacctgttcaatatcctgttgattcatgatgttctgccttatttgtggaaaattacctgaccgccagacaccacctcatcgacaatgccaatcacgcacagatcgaccggactcgtttcgcttttatgcgcctggcgggcggaactgccactcaccagtaacacccactccccggttcccgcgccaatattgtcgatggcgacggcgcattgcccgtcaggattaccttgtggatcaatcatttccaccatcagcaatttgtcatgcgccagtccgtgatggcgtacggtacaaacaatttgtccagtgacgactgccagtttcatacccgcctccgtggcgtatttcaggtaaaagctccccctaccctccgcagaaggtaaaatgaaaaaggagagagcgtgacgcccgaatcgacgtcacacagggtgattacaggttgctgctatcgcctttcaggccgatcgggaagacttcttccaggtcgccgtgcggacgcgggataacgtgtacagataccagctcgccgatacgctgtgccgctgcggcacctgcatcggtcgcggctttacaggctgcaacatcaccacgaaccatggcagtacacaggccgccgccaatctgcttaacaccaaccagcttgacgcgcgcagctttcaccatcgcgtcagaagcctcaatcagtgcaaccaggccccgggtttcgatcattcctaatgcttccattgtgctttcctctttatcagggtccagaacgggaccgttcattcaaccagtgtttgtaaactgctttcgcggttcacttctgtctgacgcggcacagctgccaccagcgccagctcgataatttcctgcacgctacaaccacgagagagatcgtgcatcggcgcggcaagtccttgtatcagtggcccgacggcacgatatccgccgagtcgttgtgcgattttgtaaccaatatttccggcttccaggctcggaaaaaccatcacattggccttgccctgtagcgggctggcaggcgctttttgcgccgccacttccggcacgaaggcggcgtcaaactgtaactcgccatccaccaccagctttggtgcgcgctcacggacgatttctgtcgcctgctggacgttagcaacacaggggtgacgggcgctaccattgctggaaaagctcagcatcgccacgcgcggctcttctccggtgatggcgcgccaggtttcggcactggcaagcgcgatatccgccagctgcgccgccgtcggctgtggcaccacgctgcaatcggcaaagcccaacgccgggccgctgtactgtggcaacatcaggaaaatggaagagagcgttttacagcctggctgcaagccgataatgcgtaatccggcacgcagcacatttgccgtggaagagaggttgcccgcgatacagacatccgctttaccggcgctgaccattgctgcggcgaacatcagagggtcggtaagtttttccagcgcatccggcggcgttttttcgcccgcgcgggccagccagcgatgagcaaattcttcccgcattgcgaggttgccatgcggatcaatcacctgtagcccgtccatcgccacgccgtgactgagcgcaaactgacgaagttcaaacggattggcgaccagaatgggcgttgccagaccttgttgatgtaaatattgcgcggctttcagcacacgttggtctaacgcatccggaaaaaccactctggcgggcgctcgcaacgccagttcacgacaacgttcaataatcattgcgtttcccccagtcgttgttggatctgcttcaccgttagcggctgcttcgttacgctcaggatcatcatcacgtagaccgtgctgctaaggcggttcagcgcctgcaaaatgtccgggcgtaatacttcaaagctgcgggtgataaagacctgcgccgctacggtttcggtttcccgcactttggtgcgtagcagattgagcaacgcagcatcgcgcccgtggctggcttccggcaccagatgatcgtggtcgagatagcgcagcggctgatgagaaagccgatgcagatcttcgtcagaaagcccgacaatcgcctggcagcccagcggttcccccagcgcatcggcgcgcataatgttgccaagacggctacggatatccgccagccacggctgccacggttccgccagttcaatttgcagccacactgccagcgcaatggtgctgtcgagaaccgcgcgaaaacccagacgcggatcgcttttggcgaccattttttccgcgctcaggtgagtcagcgtatccggcttttttgccaccggctggcgacacagttcgcagcacgcctgcggatgttcatcgctactggtcagcccatgaacgggctgcggctgctgctgttcatcgtcaacaaacaggcggccctgctcgtcaataaacttgatgcgcagatggcggctttccagcaactcccgggcagagggcgtcaggcgactgtccgcagggagatggatctctgcgccttcgctgagcgtatggttcgctcttagccatgcttcggtgatgaaatctttcatagggattgccagttagccggccaggcgacatacaggaatttcacgctggatgtcgtaccaaattcgatgctggagcctttcgggataaacatcacgtcgcctgctttggcgatcatggtttggccttcgtggcgaacatgcagctccccttccagcaccatgtcgatttcgtcgtagttcagggtccacgggaagaatgcgttctcccactgcataaaaccggcggccatgctgctgccgtcgtctccggtcacaagatcagtcaagcccacgcaatgcggctctgcgccgtcgaaacgaccaaacttgacgctactgccatcaatcactttgatgccgcctttgccggtcacgcttttgaagctcggctgcattgcgccctgctccaggctctgtttttccttcatcactttttccatcagctgtgcgaccaggctttcggtaaactggccttccggcagctgggcaatgatggtttcgcggatgcgctggctttcggttttgtcggctggcacgctggcgggcacggacgccgttaccgggatgctttcatcacattcggtgatggtaaaacccagtagatccgccacttcacgggcttccggggtaataatgctggcgcgcagaaccacggacattgcctgttcgccgcgcgcgtgtgcttcacgaatatcattcgctgtgatgagttttttcacctgcttcctcctgtttggtgagagatgccagataatccaccagttgctgcacgctttgcgggtcgtggctgtttagctcgaacatcggctcttcgaaacccgtctcaagcaataactttcgcgttgcggcgacgtcagcatctggcatgtccgttttactgatgacggcgatttgccgtttgctgacgccaatatccagcaacccggcaggcaaccgactttccgggtcatttgcgccatggacatagatcagcatgtctacatcctgtagcgtggtaattaaggcgtgataccagcggggatggttaaaatattcacccggcgtatcaatatcgcccttatcattaaattccacggcctgtgtttttctggcgagggtataattcccctgcaacgcattaaataacgttgtttttcctgccccgacgctacccacaaacgcaattcgtttcatgaatgcctcgtattaacttttggtcatttcacaaagcgtataatttaataagcgacctaaaccgctgacggtttgacttaacgcttcttctactgcgcccacgctgccataaatcaccaatgcaccgctgaatcggtcgagaaaaccgatatgcacatcagcggctttcagcgctaaatcaccggcgatcatcgccgtttcgccgggagttagcgtcataatgccaattgcgcccgcatccggaacgccgattttcttcgccagttcctcaccgggatgcgcgatgagatgcgccagtgtgacctgtttgccgggcacaaattcctgaatgatgcgttctttatccatgagtcgccgcctgtgaaaaactttcgtgtatcgtgacaatttttcgtcagagtaaataacaaaattcggcaagcgcgtttaaaaggtgaggtagatcactaagaatggagagatattcgctgtggtgcataaactttcatatgcaacgcatgaatataaataaaataatatcgagatattatatagactgcttttttttattattcgcaaactcagtaataagctttactaatatattgcagctaaactgcttaccctgaatattcagggtaagcgtgagagttaaaaaaaattacagcggttgggtttgcgcttctaccacggccagcgccaccatgttgacgatacgacgcacgcttgcgatcggcgttaacacgtgaaccggtttcgccacacccatcagcaccgggccgacagtcacaccttcgctgctggaaacacgcagtaagttgtaactaatgcgggcagcttccatgttcggcatcaccagaatattggcggaacctttcaaagagctgtccggcatacggtcgttgcgaatcgcttccaccagcgctgcatcgccgtgcatttcaccatcaatcatcagttctggtgcacgttccctgaccagttccagcgcctgacgcattttgctgctgctcgggcagtcagaagaaccaaagttggagtggctcaacaaagcaacgcgcggctcaataccaaaacgacggacagtttctgccgccatcaaggtgatctccgccagctcttctgcatccggttcatcattaacatatgtatcggcaataaaggtgttaccactcggcagcagcagcgcgttcatggcacctgcggtgtgaacgccatcgcgataaccaaagacatttttcaccacgctaaaatgttcatgataatcacccaccgtaccgcaaatcattgcatcggcttccccacgctgaaccatgatcgcgccgatcactgtcgggttactgatcagcgcccgctgcgcctgttcctgagtgacgccgcgacgcttcatgatctggaagtattcggtccagtactctttaaagcgcggatcggattcgttattgacgatctcaaaatcaacgcccgctttgatctgcaagcccagtttctgaatgcgcatttcgatcacgttcggacgaccgataaggatcggtttcgccagtcccagcgttaccagttcctgagtggcatgcagaacgcgcgcctcttccccttccggcagaacaacgcgcttcggcgctttgcgagcctgggagaaaatcggcttcataaacaggttggttttgtaaacgaactcagtcagcttgtcgatgtagacgtcgaaatcagcaatcggacgagtcgccacgccgctctccatcgcggctttagcgaccgcaggagcgatcttaacgatcaagcgcggatcaaacggctttggaatgatgtattccggaccaaagctcagatcctgatcgccatacgcactagccaccacttcgctctgttccgcatgggcgagttctgcaatcgcacgtaccgccgccagtttcatctcttcgttgatggcggttgcgccaacgtccagcgcgccacggaagatgaacgggaagcacaggacgttgttcacctggttcggatagtcagaacgaccggtgcaaatgatggcatccggacgcacttctttcgccagcggcggcagaatttccggttccgggttcgccagcgccaggatcattggcgcacgagccattttcttcaccatttcctgggtcagcactttcgggccggaacagcccaggaaaatatccgcgccttcaatcacatcatcgagggtacgtttgccgtcatccaccaccgcatatgcggctttggtttccgccatgtttggctcacggccctgatagataacgcctttactatcgcaaaccacgatgttatgtttttgcagacccagcgctaccagcaggttcatacaggcgattgctgcggcacccgcgccggaaaccaccatccgcacgtcggagatgtttttctccaccacgcgcaagccgttgaggatggcggcagtgctgataattgccgtgccgtgctgatcgtcgtggaataccggaatattcatccgctcgcgcagtttctgttcaatatagaaacattctggcgctttaatgtcttcgaggttgatgccgccgaaggttggttcgagcgcggcgacaacttcaataaatttgtccgggtcgagttcgtcaacttcaatgtcaaatacatcaatcccggcgaatttcttaaacagaacgcccttgccttccatcaccggtttgcctgccagcgcgccaatgttgcctaaccccagcaccgccgtaccgttagagatcaccgccaccaggttacctcgggcggtatatttgtaggcttttaacgggtctttttcgatttcaagacaaggtgcggcaacgcctggactgtaggccagcgccagatcgcgctgtgttgccagaggcttggttggagaaacctggattttccctggaactggaaattcatggaaatcaagtgcactttgttttaactggtcatccatttggttgttcctttcacgtaacgttcacaaataaagtgtgtgggcaacagcccctgcccacaacgtggcgcacattattaccctgccggagtctacagactttgagcaagtccaaactctcaccattaatataatgttttggtaataatcctataacactgatgttacctgcttaatccagcaataccatgcctgtctgctatgcttttttgatgcgtttagcgaaatttctcagaagtgtgaattaacgcactcatctaacactttacttttcaaggagtatttcctatgaacgagttagacggcatcaaacagttcaccactgtcgtggcagacagcggcgatattgagtccattcgccattatcatccccaggatgccaccaccaatcctagcctgttactcaaagctgccggattaagtcaatatgagcatttaatagacgatgctatcgcctggggtaaaaaaaatggcaagacccaggaacaacaggtggtcgcagcgtgtgacaaactggcggtcaatttcggtgctgaaatcctcaaaatcgtacccggtcgcgtgagtacagaagttgatgcacgcctctcttttgataaagaaaagagtattgagaaggcgcgccatctggtggacttgtatcagcaacaaggcgttgagaaaagtcgcattctgatcaagctggctagcacctgggaaggaattcgcgcggcagaagagctggaaaaagaaggtattaactgcaacctgacgctgctgttttcttttgcacaggcacgggcctgtgcggaagcaggcgtttttctgattagcccgtttgtcgggcgtatttatgactggtatcaggcacgcaagccgatggacccgtatgtggtggaagaagatccgggcgttaaaagcgtgcgcaatatctacgactactataagcaacaccactatgaaaccattgtgatgggcgcgagcttccgtcgcaccgaacaaatcctcgccttaaccggctgcgatcgactgactatcgcaccgaatttactgaaggagctgcaggaaaaagttagcccagtggtacgtaaattaatcccaccttctcagacgttcccacgcccagctcccatgagcgaagcggagttccgttgggagcacaatcaggatgcgatggcggtagaaaaactgtctgaaggcattcgtctgttcgccgttgatcaacgcaaactggaagatcttcttgccgccaaactataaaccagccacggagtgttatatgtcccgaaaagaccttgccaatgcgattcgcgcactcagtatggatgcggtacaaaaagccaactctggtcatcccggcgcgccgatgggcatggctgatattgccgaagtgctgtggaacgattttcttaaacataaccctaccgacccaacctggtatgatcgcgaccgctttattctttccaacggtcacgcgagcatgctgctctacagtttgctacatctgaccggttacgacctgccgctggaagaactgaagaacttccgtcagttgcatagcaaaaccccaggccacccggagattggctatacgccaggcgttgaaaccaccaccggcccgcttggacaaggtttggcgaacgccgtcgggctggcgatagcagagcgtacactggcggcgcagtttaaccagccagaccatgagatcgtcgatcacttcacctatgtgtttatgggcgacggctgcctgatggaaggtatttcccacgaagtctgtagcctggcaggcacgctgggactgggcaagctgattggtttttacgatcacaacggtatttccatcgacggtgaaacagaaggctggtttaccgacgatacggcaaaacgttttgaagcctatcactggcatgtgatccatgaaatcgacggtcacgatccgcaggcggtgaaggaagcgatccttgaagcgcaaagcgtgaaagataagccgagcctgattatctgccgtacggtgattggctttggtagcccgaataaagcaggtaaggaagaggcgcacggcgcaccactgggggaagaagaagtggcgctggcacggcaaaaactgggctggcaccatccgccatttgagatccctaaagagatttatcacgcctgggatgcccgtgaaaaaggcgaaaaagcgcagcagagctggaatgagaagtttgccgcctataaaaaggctcatccgcaactggcagaagagtttacccgacggatgagcggtggtttaccgaaggactgggagaaaacgactcagaaatatatcaatgagttacaggcaaatccggcgaaaatcgctacccgtaaggctagccaaaatacgcttaacgcttacgggccgatgctgcctgagttgctcggcggtagcgcggatctggctcccagcaacctgaccatctggaaaggttctgttagcctgaaggaagatccagcgggcaactacattcactacggggtgcgtgaatttggcatgaccgctatcgccaacggcatcgcgcaccacggcggctttgtgccgtataccgcgacgttcctgatgtttgttgaatacgcccgtaacgccgcgcggatggcggcactgatgaaagcgcggcagattatggtttatacccacgacagtattggcctgggcgaagatggtccgacgcaccaggctgttgagcaactggccagcctgcgcttaacgccaaatttcagcacctggcgaccgtgcgatcaggtggaagcggcggtgggctggaagctggcggttgagcgccacaacggaccgacggcactgatcctcagtaggcagaatctggcccaggtggaacgtacgccggatcaggttaaagagattgctcgtggcggttatgtgctgaaagacagcggcggtaagccagatattattctgattgccaccggtagtgagatggaaattaccctgcaagcggcagagaaattagcaggagaaggtcgcaatgtacgcgtagtttccctgcccagcaccgatattttcgacgcccaggatgaggaatatcgggagagcgtgttgccttctaacgttgcggctcgcgtggcggtggaagcaggtattgccgattactggtacaagtatgttggtctgaaaggggcaattgtcgggatgacgggttacggggaatctgctccggcggataagctgttcccgttctttggctttaccgccgagaatattgtggcaaaagcgcataaggtgctgggagtgaaaggtgcctgatggtgattgccggatgctgattgccggatgcgacgctgacgcgtcttatccggcctacagcgtcttatccggcctacatgtcccgccattttgtttaacgggtgatccacaacgtgggccaggcgtctggcccatgccagttatcgcaggtgggttctgcggcgtaacgcaccaggcgaaaacgctgaccgtcaaagcgccagcgcgcctgaatgccacaatcgcttaatccgcgccctttcgctaaggtcaccagttcacggcttttctcatcaaatgttgcgttcatcagttccagttcattcgtctcctgaccgttgttgaacggcaaacgcaaccgaaccgggcggctagctagtggctttttacggctcacaatccatgccaaatcaatggtgttataggcccctgcctcacagctaatcatcatcagcgctttatcatcagtcagcgcagtgacattcacctcacgacgcaatggatcaaggctgcagcgcagaccattcatccgccagtttccataatccagcaaatcgttgcgttcttcgagactgagtggcgtcggcgttgggttaaccaccgcgacctctttcagcgcaggcgcgggcggtacgctgagcggcggttcgtcccctttcttgatccacgcggtttcactgccaacgcgcttttgctgagcatcaataaacaacaacgctgcttttaagccactcagagaaatggtctgatcgccatcgcgtaaggtgattgccttcccttcctgaatcatctgcaaaaacgcggtgatggttgccgtatcatcggttactaataaccatggactaatccgccacttgtcaccacttaacgccaacggctcgccatctaacagcagccgtggcgctatctccccttcactcgcctccgggctcttcaatccgccgcgctcaatacgtaaaacggcatcggtatgcgccccggcgctgcggctcagggtcatcaccagtccattatgatcgcccgtattacgcgccacgcagaaattttggttattacaggtgacctgccagtcggaaaacgcccgttgcgctggtgccgcccacaccaaagacgtcggcaacaaagcgaaaaaaaagagaaggaaaatgcgatagcgcatggacggtacgaccccagaagttcaaacaaacagcacaagtcgtatcttcgttgcgcaggtagcgcggctcaatcggatttgtcggattgagccaataataaacaacgaaatattattgttatttttcagtccattaaatgactcgtttgcaaatagttaagcaataacaccgtcttaccgtcacgtatctcgccggttttgatcatctccagcgcctggctgaacggcagctcgagcacttcaatatcttcatcttcgacaccgccaccggcgttagcgcgctgattgtcactgtattcggcgataaaaaagtggattagctcagtcacaccgcctgggctcatatacagttcaaataatttgcgcacttcacccacttcatagcccgtctcttcaatcgcttctttgcgaatacacacttccggttcgtcgttatccagcagcccggcgcagctttcaatcagctgcccgctttcattgccattaacccaggtagcgacacggaactgacgaatcagaaccacggtctttttcttcgtgttgtacaggaggatcgtcgcaccattgccgcgatcgtacacttcacgtttatggcggataacttcgccgtctttgcgcgtgagatcgtaagtaatgttgtgcagggtgaaatagttatcggagagaattttgtctttaatgagggtgatttgttgcgtcataccgactccacagcgcgaaatgaacaattatcttacgctgtgaagtcgggtttgtctgcgcaggctatcagtgagatttgacactttttacccccagccagtcaataatcccctgtgccgcatgacgtccttctgccattgcggtaaccaccagatccgcaccacgcacggcgtcaccaccagcgaagattttcggattggtggtctggtaacggtactggctttccacatccgcgatgatgcggccccatttgtctaccgttacaccgtggctctccagccacggcatcccgtgcggattgaagccaaacgccataatcaccgcgtcggctggcatgacaaattcactgccttccaccggcactggacgccgacgcccctgggcatccggctctccaagacgcgtgcgcaggaaacgaatcccgcagacgtgaccttgttcattcagctcaagcgccaccggctggacgttaaattcgaagttggccccctcttcgcgggcgttcttcacttctttcttgctgcctggcatgttagcttcatcacgacgataagcgcaggtgacgttactcgcgccgtggcgcagtgcggtacgcacacagtccatcgcggtgtcgccgccgcccagtaccacgacgttaagtccggcggtattgataaacggctcttccggtagctcttcgagccccatcacctgtttagtgttggcaatgaggaacggcagcgcgtcataaacgcccggcgcatcttcattgggtaaacccgctttcatggaacggtaagtgcctacgccaacgaagaccgcgtcgtattgttccaaaaggctatccaaagagacatctttacccacttcacaattgagttcgaagtgaatccccatcgcgctgaagatttcccgacggcgtgccagcagggatttatccagtttgaaagaaggaatgccgaaagtgagcaagccaccgatttctggatggcgatcgtacaccgtcacccccacgccattgcgggtcagaacatccgcacaggccagccctgccggacctgcaccgataatcgccacccgcttgtccactttggtgacatggcttaagtcaggacgccaacctttcgccaacgcctgatcactaatgtagcgttcaatgttgccgatagttaccgcgccgtgctcatcgcgaatagtacaggcaccttcacacaaacggtcttgcggacaaacgcgtccggtaatttccggcagggtgttggtctggtgagaaagctcgacggcggcgtcgatgtttccggctttcaccagttcaatccactgcggtatatggttatgcagcgggcaggtccattcacaaacgctgtgctcgccgcacttaaggcagcggctggcttcccgttgtgcctggtcggcgcgaaatggcagataaatttcatcaaaaccggttttgcgcgcttcaatcgccagtttatccgactcgccacgcgcgggcgttgcctgcatttgttcgactttactcattaccggcatttcttgcgccgcggtactggcatgccacggttgatgttcctgacgcgcggtgcgcaagcggcgggatttcgccatgccggagagtgcgacgtcagtgaccagttgcagcgcgtccgccgggcaattctcaacacaggcaggaccgttttcgcgccccgcacaaaggtcgcatttatgcgccgtggcttttacttttcctgccgcgacgggtgtcaggacgatttgcatcgtaccaaaaggacaggccaccacgcaggatttacagccaatacacttttgctgattgacctgaatgctgtcatcaacgtggctgattgcgccattagggcagctacgggcgcagggcgcatcttcacaatggtgacaggtcactgcactacgttgctgttgatgtttgataaccgtaattcggggatgaaaatggtgttggctcaggacatgttgctcatcattgtgagccatgacacaggcgatttcacaagcatgacaacccagacattgctgactgttggccataataaaacgattcataacgaccttcttttttggttgtaaaaaccttattctttatatgagtgttgttattacccgacttacaggggaatcggcaatgttcatgtgcccagaataagtaactatttcgctataaactgtggcagatcaaataatcccatcactgactaaattgcgtttcagcgaactggaacattaatgattttttgtggagaagacgcgtgtgattgttaaacgacccgtcagcgccagtctggcccgggcctttttttacattgtgctgctgagcattctttccacgggtatcgctctgctaactctggcgagcagtttgcgcgacgctgaggctatcaatattgccggaagcctgcgtatgcagagttaccgcctgggctacgacttgcaaagtggcagtccacaactcaatgcacatcgccagttatttcagcaggcactgcatagtccggtattaaccaacctcaacgtctggtatgtgccagaagcagtaaaaactcgctatgcgcatctgaatgccaactggctggagatgaataatcggctcagcaagggcgatttgccgtggtatcaggccaatattaataattatgttaatcagatagacctgttcgtactggctttacagcactacgctgaacgcaaaatgctgctggtggtggcgatttccctggctggcggcatcggtattttcacgctggtcttttttactttgcgccgcatacgccatcaggtggttgccccgctgaatcagctggttaccgccagtcagcgtattgaacacgggcagttcgacagcccgccgctggataccaacctgccgaatgagcttggtctgcttgcaaaaacctttaaccagatgagcagcgagctgcataaattgtaccgtagcctggaagcgagtgtagaagaaaagacccgcgatctccacgaggccaagcgtcgtctggaggtgttgtatcagtgtagccaggcgctgaacactagccagattgatgtgcattgtttccgccatattttgcagattgttcgcgacaatgaagcggctgaatatctggagttaaatgtcggtgaaaactggcggattagcgaagggcaaccaaacccggaattgccgatgcagattttaccggtgacaatgcaagagacggtttacggcgaactgcactggcaaaatagtcacgttagtagtagtgaaccgctgcttaacagcgttagcagcatgctgggacgcggtttgtactttaatcaggcgcagaagcattttcagcaattattgttgatggaagaacgtgcgaccatcgcccgcgaattgcacgacagcctggctcaggtactttcttacttacgtatccagttgacgttactgaagcgtagcataccggaagataacgccaccgcacaaagtatcatggccgatttttcccaggcgttgaatgatgcttatcggcagttacgcgagctgttgactactttccgcctgacgctgcagcaggcggatctcccctccgcattgagggaaatgctggatacgttacaaaatcaaaccagcgccaaactgaccctcgactgccgtctgccaaccctggcactggatgcgcaaatgcaggtgcatttgttgcaaattattcgcgaagcggtgctgaatgcgatgaagcacgccaacgccagcgaaatcgccgtcagttgcgtcaccgcgccggacggcaatcacacggtttatatccgtgataacgggattggtatcggtgaaccgaaagaacccgaaggtcattatggtctgaatatcatgcgcgaacgcgcggaacggctaggtgggacgctgacttttagtcaaccttccggcggcggcacgttagtgagtattagctttcgctctgcggagggtgaggaaagtcagttaatgtaatgcctcctactgaccaaagaatacttgcacttaaggttcagtataaaagggcatgataatttacattaactcctttttttctccacgattggctcgtaccttgccgctacagtgaagcaagtcaagcctacaacgatacgcagaaacacgaggtcctcttttaatggcgaatttctttattgatcgccccatttttgcctgggtgctggcaatcctgttgtgtctgacaggtaccctggcgatttttagtttgcccgttgaacaataccccgatctcgcgccaccgaatgtgcgagtgaccgctaactatcccggcgcaagcgcccagacgctggaaaacaccgtgacccaggttatcgagcaaaatatgaccggcctcgataatctcatgtatatgagttctcagagcagtggcaccggtcaggcatctgtcactttaagttttaaagcaggcaccgatccggacgaagccgtgcagcaagtacaaaaccagctgcaaagtgccatgcgaaagttaccgcaggcggtgcaaaatcagggcgtgacggtgcgtaaaaccggcgataccaacattctgaccattgccttcgtctctaccgatggtagcatggataaacaggatattgctgattatgttgccagtaatattcaggacccgttaagccgcgtgaatggcgtcggggatatcgatgcctatggtagccaatattccatgcgtatctggctggacccggcgaaactcaacagtttccagatgacggctaaagatgtcactgatgccattgagagtcagaacgcgcagattgcggttgggcaacttggtggtacaccttccgtcgataagcaggcgctcaacgccaccattaacgcccagagtctgctgcaaacaccagaacagttccgcgatatcaccttgcgggtcaatcaggacggcagtgaggtaaggctgggcgatgtcgccaccgtcgaaatgggggcggagaaatacgattatcttagccgcttcaatggtaagccagcctccgggctgggggtaaaactggcctccggcgctaacgaaatggcgacagcggagctggtgctcaatcgtctcgacgagctggcgcagtatttcccgcatggactggaatacaaggtggcgtatgaaaccaccagctttgttaaagcctccattgaagacgtggtgaaaacgctgctggaagctatcgctctggttttcctcgttatgtatctgttcctgcaaaacttccgcgccacgctgatacccactatcgccgtgccggtggtgttgatgggaaccttctccgtactttacgccttcggttacagcgtcaacaccttaaccatgttcgcgatggtgctggcgatcggtctgctggtggatgacgccatcgtggtggtggaaaacgtcgaacgtattatgagtgaggaaggactcactcctcgcgaagccacacgtaaaagcatggggcagatccagggggcactggtcgggattgcgatggttcttagcgcggtatttgtaccaatggccttcttcggcggcaccaccggtgccatctatcgccagttctctattaccattgttgcggcgatggtgctgagtgtactggtagcgatgatcctcactccggctctgtgtgccacactacttaagccactgaaaaaaggtgagcatcatgggcaaaaaggcttttttgcctggtttaaccagatgtttaaccgcaacgccgaacgctacgaaaaaggggtggcgaaaattctccaccgtagcctgcgctggattgtgatttatgtcctgctgcttggcggcatggtgttcctgttcctgcgtttgccgacgagcttcttaccgctggaagaccgtggcatgtttactaccagcgtacagttgcccagcggtagtacgcaacaacagaccctgaaagtcgttgagcaaatcgagaaatactacttcacccatgaaaaagacaacatcatgagcgtgtttgccaccgttggttctggccctgggggtaacgggcaaaacgtggcgcgaatgtttatccgcctgaaagactggagcgaacgcgacagtaagaccggcaccagctttgccattatcgagcgtgcaacgaaggcgtttaaccaaattaaagaagctcgcgttatcgccagcagcccgccagcaattagcggtcttggtagttctgcaggttttgatatggagttgcaggaccacgctggagcgggtcacgatgcgctgatggcagcacgtaatcagttgctggcgctggcggcggaaaacccggagctaacccgtgtgcgccataacggcctcgacgacagtccgcagttgcagattgatatcgaccagcgtaaagctcaggcgctgggcgttgctatcgacgatattaacgacacactgcaaaccgcctggggtagcagctatgtgaatgactttatggatcgcggtcgcgtgaagaaagtctatgtgcaggcagctgcgccgtatcgcatgctgccagatgacatcaatctctggtatgtccgaaataaagatggcggcatggtgcccttctctgctttcgcgaccagtcgctgggaaacaggcagcccgcgtctggaacgctataacggttattctgcggttgagattgttggggaagccgcaccgggggtcagtaccggtacggcgatggatattatggaaagcttagtgaagcagctgccaaacggctttggtctggagtggacggcgatgagctatcaggagcggctttccggcgcgcaggctccggcgctgtacgccatttccttgctggtggtattcctgtgtctggctgcgttgtatgaaagctggagcgtgccgttcagcgtaatgctggtcgtgccgctgggggtaatcggcgcgctgctggcaacctggatgcgcgggctggaaaacgacgtttacttccaggtgggcctgttaacggtcattggtttaagcgcgaaaaacgccatcctgatcgtcgagtttgctaacgagatgaaccaaaaaggccacgacctgtttgaagcgacgctccacgcctgccgtcagcgtttacgcccgattctgatgaccagcctggcatttatcttcggcgtattgccaatggcaaccagcacgggtgccggttccggtggtcagcatgcggtgggtactggcgtaatgggcgggatgattagcgccactattctggctatttacttcgtgccgctgttctttgtgctggtgcgccgccgcttcccgctgaagccgcgcccggaataagcaataaaaaaggcgacatgccaatgtgtcgcctttttcaactttccgattaagaacctgctcagcgggttcttgctgtttgtactttgtctcaggaattacttacgaagcataacttcgataaagtctttccagttccccagttcacgttcaatcataacaacctctcttataattatgggtattctacggaaacaatataccgtggtgaagctaatttactcgattgctgcgatgactacctccgggggacaaatcttatgtaaatactatggtcctgcggtgatgatttgtatgtgatacacagcaacatttcgagatattcatacggcatctaatactgatttaattctggttaaaatacagacagataacaagatgaatattcttaatgtttacgttaaaaatgtttaatattatttaatagttgttaatttgaatacttcgataatgttatatttcctgataatcatttgcaggcaaaatgttttcacccttaaatgagtatttattctcataaatcgaaaaaggattcattatggttacactttacggtatcaaaaattgtgacaccattaaaaaggctcgccgttggctggaagccaataacatcgactatcgttttcatgattaccgcgtcgatgggctggacagcgaattattgaacgattttatcaacgaattaggctgggaagcgttactcaacacccgtggtacaacctggcgtaaactggacgaaaccacccgcaataaaatcaccgatgcggcctctgcggcggcattaatgactgaaatgcctgcaattatcaaacgtccattgctctgcgtgcccggtaagcctatgctgctgggtttcagtgattccagttatcagcaatttttccatgaggtgtaatctatgagctgcccggttattgagctgacacaacagcttattcgccgcccttccctgagtcctgatgatgcaggatgccaggctttgttgattgaacgtttgcaggcgatcggttttaccgttgaacgcatggactttgccgatacgcagaatttttgggcatggcgtgggcagggtgaaacgttagcctttgccgggcataccgacgtggtgccgcctggcgacgccgatcgttggatcaatcccccgtttgaacccaccattcgtgacggcatgttattcgggcgcggtgcggcagatatgaaaggcagcctggcggcgatggtggtggcggcagaacgttttgtcgcacaacatcccaaccatacggggcgactggcatttctgatcacctctgatgaagaagccagtgcccacaacggtacggtaaaagtcgtcgaagcgttaatggcacgtaatgagcgtctcgattactgcctggttggcgaaccgagcagtatcgaagtggtaggtgatgtggtgaaaaatggtcgtcgcggaagtttaacctgcaaccttaccattcatggcgttcaggggcatgttgcctacccacatctggctgacaatccggtacatcgcgcagcacctttccttaatgaattagtggctattgagtgggatcagggcaatgaattcttcccggcgaccagtatgcagattgccaatattcaggcgggaacgggcagtaacaacgttattccgggtgaactgtttgtgcagtttaacttccgcttcagcaccgaactgactgatgagatgatcaaagcgcaggtgcttgccctgcttgaaaaacatcaactgcgctatacggtggattggtggctttccgggcagccatttttgaccgcgcgcggtaaactggtggatgcggtcgttaacgcggttgagcactataatgaaattaaaccgcagctactgaccacaggcggaacgtccgacgggcgctttattgcccgcatgggggcgcaggtggtggaactcgggccggtcaatgccactattcataaaattaatgaatgtgtgaacgctgccgacctgcagctacttgcccgtatgtatcaacgtatcatggaacagctcgtcgcctgatgagtggttctgcaagaggaaataagcatggactggctggctaaatattggtggattctggtgattgtctttttggtaggcgtcctgctgaacgtgattaaagatctcaagcgcgtcgaccataagaaatttctcgccaacaagccggagcttcccccgcatcgtgatttcaacgataagtgggacgatgacgacgactggccgaaaaaggatcaaccgaagaagtaagctgagtgctcaaccgtaggccggataaggcgttaacgccgcatccggcaatggtgaacgatgcctgatgcgacgctcacgcgtcttatcaggccaggtaatctgtcttttacatcatttcaatcacatcatcatcgccaggcttaccgccacttagcgcttcgtcgaaataatgtttcggaatggtataacgcaagtgatccagggcaaattgcatactgcgattgtcgatcgcatggcctaaatcctccacgatatccagcgtcacgtcaccaccggcactgattaacgcttcctgcgccgcaaccgcatgcgccagatcgataaccggatcttcaccgccatgaatcaggtgaattgtcgtggctgtagacgcagtttccggcaggctcgcatagcgtccgttaaaagcaatgacgcgactagcaaggcccggttcggctttaatgctctccagcaccataatcgcgccttgagagaaaccgatgagcgccgtggcgttagcccctactccgctctgtttctgccagtagcgcaccgtttcaataaacgtcggcatgatcgcatccacacgcgcctggcgattatcttccgtaataccctgcacgctaaaccactgacgccccgccggattaccgctcggctccgcgccaccgacactcaccaccagcgcatcaggaaacagcggtgcaaaccagttgcctatttcccccattgccaccgggttatccccgacaccgtggaaaagcagtaacaactgttgcgcaggtttatccgggctttgaacaacaaaatggtcatgtttcatggcgaactccttaactgatgtcattaattttacgccgctgactcacaatgaccatgagataaaattgaaggagtcagtgaaataattgccattgcgttatgcgatcgcgcagacgctcagtgcgaacatcattaagtgcgaacagcgcctgcgcggcctcttcccgctgacggaccagtaacatcttgcggccactaagtttaagtgtggtacataactgcgcatcactggcgtttttctgtaaacgcccacgcagcgccggtaatgccagttcactggtttgtaacagacgcaataagcaacctaagctcgttaatagcggacgatgagcgaaagcaaaaccggccagttcaagccagtcgtcgtcagaaaggacggcatcgtttagtggatcaacaggaagcgtttcgccattccactgcgcgagagcttgcgcatcgcgacgtaaacggtaatgctcacgttcagccagctgtttacccgcatcactcatcggtaacagcgccatcgccgtatagcaaccgctgctggcttcccgatgattacccatccgcaccagcacaaaaccgcagcgttgccagaaacgccataactccccggtgtaaccaaaactcacgctaagatagtcgaggtcttgcgtatattgcaaagcaccagcaataagttgccgccctgtgccttcccgctgacgagccggatgaactgctatccggctgacccgccgtccacgcaatgtcgccgccagtggattgttgccgtgcgccgccaggctctgggccaccagattaccccgcgggcgacgaaaacctgcccataccgcctgactgagttgttgagataatccaccctcatccaccagccacagcgccccggcaatctcgttttcgccagccgcctgtaaaaaatgttgccctggtgcatccatcatccggcgtaaatccagcgggctagtccgatagtgcgcaccagacaagagctgataaacctttaacggcgtttctggatcgctttgccataacgtctgttcaaatgcggaaatgacaatattgccttgtggtgtatgggtgaagttttcatcgtcaaaaaccagtgcctcgctgaccattttttccagcgggcatccctgcgcccagcggatcggctgttgcagttcaaaacggtgtaaatgcggaaagcgagcgcaaaatttcagcaaaaaaccacgtccggtgccttcgtagccctgcaccgtagtggttaacaacgttcgaggaaaacggcttaccagttgatgcaacaatggcgcaggtatggctgcggcttcatcgaccaccagccagtcggcttgctcatcgctggctaacaaggcatccggcgcaataaagcgaaacttctcgcccgcaaattgtgccagtacatccgtactcgcttttgcgggcgcggtgacaatcgctctgcccgcaatacgagaaatgagttgccctgccaacgcgctcttaccgcgcccacgcgcagccgttaccgctgccacgcccggcggcatggtcattagctgctttaagagttgctgttgttctggttgtggtgcgccagtcgcggggtaccagtcagtacggggagtaaaatgcgccaagctgaatggctggttttgccgccagaggatagcctcgttatccgccgtaagtacgcgtttgagatgctggacaaaatgcggcgtcgcaatagggtcagggcaatcactccagcgcaggctgtcggcatcaggttggttttcccactcttcccatacagggagtaacaaaaccagccagcttcccgctttcaacgttccgctaagtgcggcaaaggcagcggcatcaaagccgtggcgggcgtcgaataccgcatgccggaactcgcgcccaagtaaagtttgtagtgcgctgggagaacagtggttttcagcatctggccgcgggctaatccacagccagtcgccaggtaaggcatcacgcaacttaagagtatgctcaaaacaccaaccctcttccccgctcaacaccagcaagcggcggatcccttcacgtttcatttgcgctgttaatgtgtgaagcgcagtcagttcagccatccctgccccggaagttaaatgcttttaccaaaagtattgcattgtgccggatcgccgctgtcgaaaccacgtttaaaccagctgtagcgttgctgagaagtgccatgagtgaaactgtctggtactactcgcccctgactttgctgttgtaaacggtcatcgccgatggcctgcgccgcgttcagcgcctcttccagatcgccggtttccagaacgccttgctgctgcatactatgcccccagacaccggcaaaacagtcggcctggagttccatacgcacagataagcggtttacttccgcctgcgtcgcgttttgttgcagttgacgaactttcggctcgatgcctaacagtttctgcacatgatgaccgacttcatgggcgataacgtacccctgggcaaaatcgccatccgcgccaagtttgtctttcatgtcatcatagaaggagagatcgatataaaccgtgccatccgccgggcaatagaacggccccattatggactggcccgccccgcagccggtacgcgtcattccacggtacatgaccagcttcggttgctgataggtcttacccatcttctcgaactgttgtccccaggtgtcttccgtggttgccagaatcacgctggtgaattttgcggcttcgtcttcatttgggctaatactccgcgtactttgttgttgggaaaccggctgcccggtcatcaacccggttaaatcaacaccatagtagcctgcaaccagcacgactatcagtaaaatcagcccgcctttaccgcttggcaggcgaaaaccgggaccgcccatagatggaccaccagagctgttgcgcctgtcttcaacattgtcactttcacgtcgcccttgccaacgcatagatacctcaacaatatattcattatagaaatgatcgtaggtggttcagaggaagattaccacaggaaagcgggatgaaatggcggaggaatgagcgttcaatgcatatattccgagagcggttgtcttgccgtgccagctgcacggcaagatgatgaacagaaaaatcagtccagctgtacacccaggcggcgggcgacggcttcataggcttcgatcaggccaccgaggctctggcggaaacggtctttgtccattttctccagcgtttctttgtcccacaggcggctaccgtccggggagaactcatcacccagtaccacttcgcctttgtacagaccaaattccagcttgaagtcgaccagaatcagaccagcatcatcgaacagttttttcagcacgtcgttcgctttgtaggtcagctctttcatacgcgccaggttctctttgctcacccagccaaaggtttcgcagtaagattcgttgaccatcggatcgtgcatggcgtcgtttttcaggaacagatcgaacagcggcgggttcagctcaataccttcttcgattccaagacgtttcaccagagagccagcagcacggttacgcacgacacactcaaccggcaccatatccagctttttcaccagacattcggtatcggagagcagacgctccatttgagtcgggatacccgcttcagccagtttgctcataatgaagtagttgaacttgttgttcaccatacctttgcgatcaaactgctcaatgcgcgcgccatcccctgcactcgtatcattgcggaattcgagcaccaacaggtccgggttttccgtgctgtatacggttttcgctttaccacgatacaactcagcttgcttttgcatctttatcactcctgggtgtgaattaacgttttaaaatcttttgctgtctggtgtgccggatgttttgtcggatgcggcgtgaacgccttatccgaactacgtccgacaaacaaatttcgtgcgaattaccgctaaaatcgcgttttcctgcagacgcacacgtttgcgtatcatatcagaaaaaagggccggatgattccagccctgtatttttacttgctaaacgcagcctggaagacagctaccagcgcgtcgttctgactctgagtcagagtatgacctttcggatcgatgaactgtaggctgctgcggttatctaaatcgccaacctgcagtttatagtcaccggatgccaggcctggatcgctcgcgcccagttcctgccagtcgctgtcagacagcggcttataagttacggccatgttgccctggctacgggtgctgtcggtcactttcatgcccactttttccagcgccgctggcagacgttgccaaaccacattgaacggcccgcgtacgaccagcattggtaaaccggtgtcatcagctgcactttgtacgtccatagtggtggaggcacgattttgcgcagcgttcgcggcgtcagtggcagatttatccagaccggcggaaataacgttcatcatctccgtgctgtaacgctgcatggaagccgcgtctgcaaccggtttgcccgcctgttccaggttcagcagtttaaccgtaaccgcctgctgataaccctgcggcttaacagagatttgataacgaccacgatactgctcgtcttcgtccagacggttccattgtacccaatcggtggtcagtgtctgaccagcatcatcacgttgggtgatggtgtagtttttcgcctgcagcacgctaaccacctgcggccacagagtattgccacgaccattttccaccagcaaactagcggtatcgcccgtgaactgggtacgcgcgccagaaaccagtgccagcggctgggctggtggacgaatgtccagcgccttaccgacagcaccactaccgttggtcaccgggattgcataatcaccggaggtcaccggcaaaatcattccagccggggcatgaagctccgcaagcggtgccgcttccaggtaggcttcatcaccactgacctgacgcttatagcgactgtcagaactacaggcagcgagtaataaaacaaggctaacacccgcaacctttgccaggcggctcttttgaacagagtaagccatcaaatctccctaaactttacagcaaaccggcatgcttaagcgccgctctgaccgtctcacgaccactgtcggtgattggtgtcattggcaggcgcagcgtatcggtcgccacaagacccagttccttacatgcccatttcaccgggattggattgggttcgacaaatagtttgttgtgtaatggcatcagacgctgattaataacgcgtgcctcggcaaaatgcccttctgctgccagtttgcacatctgggccatatcacgcgctgcgacgttagccgtaacggaaataaccccatgaccgcccaattgcatgaagtccagcgcgctcgcatcatcgccgctcagcagaacaaaatcatcactaaccagctctttgatctggtttacacgcgttaagttccctgttgcctctttgattccgataatattttttactttcgccagacggcccaccgtttccgggagcagatcgcagccagtacgggacggcacattatacagaatttgcggcaggtcagtatgctcagcgatggctttgaaatgctgatacaaaccttcttggctcggacgattgtagtaaggggttaccgtcaggcagccgacgataccactgtcattgaagcgctgcgtcaggctaatggcttccgcagtagcgttagcgccggtcccggcaattaccggaatgcgcccatcagccagatccagcgtcatcatcaccacatcagcatgttcgtcatgatttaaggtagcggactcgccagtggtgccaacagaaacgatcgcgctagtaccgctggcgacatgataatcaatcagttttttcaagctagcccgacagacattacctttttcatccatcggagtaacaatcgcgacaatacttcccgtgaacatgggccatcctctgtgcaaacaagtgtctcaatggtacgtttggtatggcattaaaagcaagcagacagaaccgttctgattgttgtatgcatgtttttttatgctttccttaagaacaactcaccccttaaaggaataaccagtttgacactgagtagccaacattatctggtgatcactgcgttgggtgccgatcgccctggaattgtgaacaccatcacccgtcatgtcagtagttgcggctgtaatattgaagacagtcgcctggcgatgctgggagaagagttcacgtttattatgctgctttccggtagttggaatgccattactctgattgaaagtacgttaccgttgaaaggtgccgaactggatcttttaatcgtgatgaagcgcacgacggcgcgtccgcgtccgccaatgccagcatctgtctgggttcaggtcgatgtggcagactccccgcatttaattgaacgcttcacagcacttttcgacgcgcatcatatgaacattgcggagctggtgagccgcacgcaacctgctgaaaatgaacgggctgcgcagttgcatattcagatgaccgcccacagccccgcatctgcggacgcagcaaatattgagcaagcgttcaaagccctatgtacagaactcaatgcacaaggcagtattaacgtcgtcaattattcccaacatgatgaacaggatggagttaagtaatgaatccactgaaagccggtgatatcgcaccgaaatttagcttgccggatcaagacggagaacaagttaatttgaccgacttccagggacagcgtgttctggtttatttctacccgaaagccatgacccccggctgtaccgtacaggcctgcggcttacgcgataacatggatgagttgaaaaaagcgggcgttgatgtgctgggtatcagcaccgataaacccgaaaaactctcccgttttgcggaaaaagagctgcttaactttacgctcctgtctgatgaggaccaccaggtgtgcgaacaattcggcgtctggggtgaaaagtccttcatgggcaaaacctacgatggcattcatcgcatcagcttcctgattgacgctgatggcaaaatcgaacatgtctttgacgatttcaaaaccagcaatcaccacgacgttgtgctgaactggctgaaagaacacgcctgattactttgctccattccgtgctggctgcgcttgcggccagcatacctcacttctcgtgatcaagatcacattctcgctttcccctgcgacacgggtgtcgaatccattttttgctgaacgttaatgaccatcatttttgtaccgttcagaatccagttaatacataacttattgaatatattgagttaatcagaatggcatcctttatgcaatatgaaatgcaatgtttcatatcattttcaaggagccgacatgaaccgctttgtggtggccgaaccactgtggtgtacaggatgtaatacctgtctcgctgcctgtagcgacgtgcataaaacgcaaggtttacagcaacacccgcgcctggccctggcgaagacgagtacaatcactgcccctgtcgtgtgtcatcactgtgaggaagccccttgcctgcaggtctgcccggtcaatgccatctctcagagggatgatgcgatccaactcaacgaaagcctctgtattggctgcaagctttgcgccgtggtctgcccatttggcgcaatcagcgctagtggaagccgtccggtgaatgcccatgcgcaatatgtttttcaggctgaaggcagtctcaaagacggcgaagaaaacgcgccaacacaacatgctttgctgcgctgggaacctggtgtccagaccgtcgcggtgaaatgcgacctgtgtgatttcttgccagaaggtccggcctgcgttcgcgcttgcccgaatcaggcgttacggctgatcaccggtgatagcctgcaacgtcagatgaaagaaaaacagcgccttgccgcaagctggtttgccaatggcggggaggatcccctttccctcactcaggagcaacgctaatggatgccctgcaattattaacctggagcctgattctctatctgtttgctagtctggctagcctgtttttactcggcctggacagactggctattaagctttccggcatcacaagcctggtgggcggcgtgattggcatcatcagcggaattacgcaattacatgctggtgtaactttagtcgcccgttttgcccccccttttgaatttgccgatttaaccctgcgaatggatagcctcagcgcatttatggtgctggttatctccttgctggtggtggtttgttctctctatagtttgacttatatgcgcgaatacgagggcaaaggcgcggcggcgatgggcttctttatgaatattttcatcgcaagcatggttgccctgctggtgatggacaacgctttttggttcatcgtgctgtttgaaatgatgagcctgtcttcctggtttctggtcattgccaggcaggataaaacgagcatcaacgctggcatgctctacttttttatcgcccacgccggaagcgtgctgataatgatcgccttcttgctgatggggcgcgaaagcggcagcctcgattttgccagtttccgcacgcttagtctttctccggggctggcgagcgcggtgttcctgctggcctttttcggttttggcgcgaaagccgggatgatgccgttgcacagctggttgccgcgcgctcaccctgccgcaccaagccacgctagcgcgttgatgtctggcgtaatggtcaaaataggtattttcggcatcctgaaagtagcgatggatctgctggcgcaaacgggtttgcctctgtggtggggcattctggtgatggcgatcggcgcaatctccgcgctcctgggcgtgctatatgcgctggcggaacaggatatcaaacggctgctggcctggagtaccgtcgaaaacgtcggcattattttgctggcagtcggtgtggcgatggtcggtctgagtctgcacgacccgctgctcaccgtggttggactgctcggcgcactgtttcatctgctcaaccatgcgctgttcaaagggctgctatttctcggcgcgggagcgattattagccgtttgcatacccacgacatggaaaaaatgggggcactagcgaaacggatgccgtggacagccgcagcatgcctgattggttgcctcgcgataagcgccattcctccgctgaatggttttatcagcgaatggtacacctggcagagcctgttcagtctaagtcgtgtggaagccgtagcgctacaacttgcgggtcctattgctatggtaatgctggcagtcactggtgggctggcagtaatgtgcttcgtaaaaatgtacggtattactttctgtggtgcgccgcgcagtacacacgctgaagaggcacaggaagtgccaaatacgatgatcgtcgccatgctactgctcgcggcactctgcgtattaattgcgcttagtgccagttggctggcaccgaagataatgcatattgcccatgcgtttaccaatacccctcccgccactgtcgccagcggaatagcacttgtacccggcacgtttcatacacaggtcacccccagtttactgttgctgttactactggcgatgcctttgctgcctggcctttactggctgtggtgtcgtagccgccgcgcagcgtttcgtcgcacaggagatgcctgggcatgcggctacggctgggaaaatgcgatggccccgagtggcaatggcgtgatgcagccgctgcgtgtggtcttttctgcgctatttcgtctacgacaacagctcgaccctacgctgaggctaaataaaggtcttgcgcacgtcaccgccagggctcagagcacagaacccttctgggatgagcgggtgatccgccccatcgtgagcgccacccaacggctggccaaagaaatacagcatctgcaaagcggcgactttcgtctctattgcctgtatgtggtcgccgcactggttgtgctgctaatcgctattgccgtctaaggaaatcaccatgagacaaactctttgcgacggatatctggtcatttttgcgttagcacaggccgtgattctgctgatgctaatcccactttttacgggtatttcccggcagatacgcgcgcgtatgcactcccgccgcgggccggggatctggcaggattatcgcgatatccacaaactgtttaaacgccaggaagttgcgccgacatctagtggtctgatgttccgcctgatgccgtgggtattaatcagcagcatgctggtgctggcgatggccttaccactgtttattaccgtttccccttttgcgggcggcggcgatctgatcacccttatctatcttcttgccctgtttcgttttttctttgctctttccgggctggataccggaagtccgtttgcgggagtcggtgccagtcgcgagttgacgctcggcattctggtcgaaccaatgcttattctcagtctgctggtattggcgctgatagcaggttccacgcatatcgagatgatcagcaatacgctggcgatgggctggaacagcccgctaaccaccgtactggcgttactggcctgtggttttgcctgcttcattgagatgggaaaaattccctttgatgttgctgaagcagaacaggaattacaggaaggcccgctgaccgaatattccggtgccgggctggcgctagcgaaatgggggctggggctgaaacaggtcgtgatggcaagtctgtttgtggccctgtttctgccctttgggcgcgcgcaagaactttctctcgcctgcctgctgactagtcttgtcgttacgctgctcaaggttttgctgatttttgtactggccagtatcgcagaaaacacgctggcacgcgggcgttttttactcattcaccatgtgacctggcttggcttcagccttgctgcgcttgcatgggtcttctggttaaccggtctgtaaggagcactgacggaatatggaaaatcttgctctgacgacgttattgctgccttttatcggcgcactggtcgttagctttagcccacaacgtcgggccgccgaatggggggttttgttcgccgcgctgaccacgctgtgcatgttgagtctgatctccgcgttttatcaggccgataaagttgccgtcacgttgacgttggtcaacgtgggggatgtggcgttgtttggcctggtcattgatcgcgtgagtacgctgattctgtttgtggtggtgtttctcggtttgctggtcacgatctactccacgggttatctgacggataaaaatcgcgaacacccgcataacggcacgaatcgttattacgcatttttactggtgtttatcggcgcgatggcgggactggtactctccagcacgctgctcggtcagttgttgttttttgaaattacaggcggctgctcctgggcgttgatcagttattaccagagcgataaagcgcagcgtagtgcactaaaagcgttacttatcactcatatcggcagcttggggttgtatcttgccgccgccacgctgtttttgcagaccggaacgtttgcgcttagcgcgatgagcgagttacacggcgacgcacgttatctggtttatggcggcatcctgtttgccgcgtgggggaaaagcgcccagctaccgatgcaagcgtggctaccggacgcaatggaagcgccaacaccgatcagcgcctatctccacgccgcaagcatggtgaaagtgggcgtttacatttttgcccgcgctattatcgacggcggcaatatcccgcatgtgattggcggcgttggcatggtcatggcactggtcaccattctttatggctttctgatgtatttgccacagcaggatatgaagcggttgctagcctggagcaccatcactcaacttggctggatgttcttcggcttgagcctctccatcttcggcagccggctggcgctggagggcagcatcgcctacatcgtcaaccacgcgttcgctaaaagcctgtttttccttgtagcaggtgcgctgagttacagctgcggcacgcgcttgttgccgcgtctgcgtggcgtattgcacaccctgccgttgccaggcgtgggtttctgcgtggcagcgctggcgattaccggcgtgccgccgttcaacggcttcttcagtaaattcccgctgtttgctgccggttttgcgttgagtgtggagtactggatcctgctgcccgccatgattcttctgatgattgaaagcgtcgccagtttcgcctggtttattcgctggtttggtcgcgttgtgcctggcaaaccgagcgaggccgtcgccgatgccgcaccgctgccaggaagtatgcgcctggtgttgattgtactgattgtgatgagcctgatttccagcgtaatcgccgcgacctggttgcagtaaggagatgatgaatgaccggttctatgatcgtaaataatctggcgggactgatgatgctgacaagcctgtttgtgattagcgtcaaaagctatcgcctgagttgcggattttacgcctgccagagtctggtgctggtgtctattttcgccactctcagctgcctgttcgccgcagagcaactgctgatctggtccgccagcgcctttatcaccaaagtgctgctggtaccgttaatcatgacttacgctgcacgaaatattccccagaacatcccggaaaaagcgttattcggtccggcaatgatggcactgctcgcggcgttaattgtcctgctttgcgcatttgtcgttcagcccgtgaagctaccgatggctaccgggctgaaaccggcgctggcggtagcgttaggtcattttctgcttggcctgctgtgcattgtcagccagcgcaatatcctgcggcaaatttttggttactgcctgatggaaaacggctcccatctggtgctggcgcttcttgcctggcgagcaccggaactggtggaaataggtatcgctaccgacgccatcttcgccgtcattgtgatggtgttactggcaagaaaaatatggcgtacccacggcacgctggacgtgaacaacttgaccgcgctgaagggataatgagatgagttattctgtgatgttcgctttactcctgctcacgccgctgctttttagcctgctctgttttgcctgccggaaacggagactttctgcgactcgcacggtgaccgtattacatagcttagggatcacactgctgctgattctggcactctgggtggtccaaactgccgctgatgcaggagaaatattcgctgcgggactgtggcttcatattgatggtctgggcggtttgttcctcgccattcttggtgtgattggctttctcaccggtatttacagcattggctacatgcgtcatgaagtggcacacggcgagcttagtcccgttacgctgtgcgattactacggtttcttccatctgtttttgttcaccatgctgctggttgttaccagcaataacctgattgtgatgtgggcggcgatcgaagccaccaccttaagcagcgcgtttctggtaggcatttacggtcagcgtagtagcctggaagctgcatggaagtacatcattatttgtactgttggtgtcgcttttggtctgttcggtaccgtgctggtatacgccaacgccgccagcgttatgccgcaggcagaaatggcgatattctggagcgaggttcttaagcaaagctccttgcttgacccaacattaatgctgttggcctttgtgtttttgctaattggctttggtaccaaaaccgggctatttcccatgcacgcctggctgccggatgctcacagtgaagcgccgagtccggtcagcgccctgctctccgccgtattgctgaactgcgcgctgttggtgctgattcgctattacatcattatttgccaagccatcggcagcgatttccccaaccggttgttgctcatcttcggcatgttgagcgttgccgtggcggcatttttcattctggtacagcgggacattaagcgtctgctggcgtactccagcgtggagaacatggggctggtcgcggtggagctaggcattggcgggccgctgggaatttttgccgcgctgctgcacatcttaaaccacagtctggcaaaaacgctgctgttctgcggttccggcaatgtactgctcaagtacggcacgcgcgatctcaacgtcgtctgtgggatgctcaaaatcatgccatttaccgccgtgctgtttggcggcggtgcgctggcgctggcagggatgccgcccttcaacatttttcttagcgaatttatgaccattaccgccggactggcacgtaatcacctgctgattatcgtcctgctgttattgctgttaacgctggtgctggcgggcctggtacggatggctgcgcgggtgttaatggcgaaaccgccgcaggccgttaaccggggtgatctcggctggttgaccaccagcccaatggtgattctgctggtcatgatgctggcgatgggaacgcatattccacaacctgtcatcaggatcctggcgggcgcttccactatagtcctcagtgggacgcacgatctgcctgcacaacgtagcacctggcatgattttttgcctagtggcaccgcatctgttagcgagaaacacagtgaacgttaatagtagcagtaatcgtggcgaagcgattctcgccgccctgaaaacgcagttccccggcgcggtgctggatgaagagcgacaaacgcctgaacaggtcaccattacggtgaaaatcaatctgctgcctgacgttgtacagtatctttattatcaacatgatggctggcttccggtcctgtttggcaacgacgagcggacacttaacggtcattacgcggtttattatgcccttagtatggaaggggccgaaaaatgctggattgtggtgaaggcgctggtcgatgccgacagtcgggagtttccgagtgtcacaccgcgcgtccctgccgcggtctggggcgagcgagaaattcgcgatatgtacgggctgattccggttggcctgccggatcagcgtcgcctggtgttgcccgatgactggccggaagatatgcatccgctgcgcaaagatgcgatggattatcgactgcgccctgaaccgacgactgattccgaaacgtatccgtttatcaatgagggcaacagcgatgcgcgggtgatccctgtcggcccgctgcatatcacctccgatgaaccgggtcacttccgcttgtttgtggatggcgagcaaattgtcgatgctgattaccgcctgttttatgtccatcgcggcatggagaaactggcagaaacgcggatgggctacaacgaagtgaccttcttaagcgaccgcgtgtgtgggatttgcggttttgcccacagtgtggcctataccaatagcgttgaaaatgcactggggattgaggtgccgcaacgagcacatactattcgcagcattctgctggaagtcgaacggctacacagtcatttgcttaaccttggcctctcctgccatttcgttggttttgataccggctttatgcaatttttccgcgtgcgggaaaagagcatgacgatggcggaattgctgatcgggagccgtaaaacctacggtctgaatctgattggtggtgttcgccgcgatattctcaaagagcaacgtctgcaaacgctgaaactggtgcgcgagatgcgcgccgacgtgagcgagctggtagagatgctgcttgctacgccgaatatggaacaacgcactcagggcattggcattctcgaccgacaaatcgcccgtgatttgcgctttgatcacccctacgccgactacggcaatattccaaaaacactgtttacctttaccggcggcgatgttttctcccgcgtgatggtccgtgtcaaagagacgtttgatagcctggcaatgctggaatttgccctcgacaacatgccggataccccactgctgaccgaaggctttagctataaacctcacgcattcgcgctgggctttgttgaagcgccacgcggtgaagacgtgcactggagcatgctcggtgataaccaaaaattgttccgctggcgctgccgtgccgccacctacgccaactggccggtgttgcgttacatgctgcgcggcaataccgtttctgacgcaccgctgattatcggtagccttgatccctgctactcctgtaccgaccgtgtgacgctggtagatgtgcgcaagcgccagagtaaaaccgtgccgtataaagagatcgaacgctacggcattgatcgtaaccgtagcccgctgaagtaaggacagaagatgctgaagttactgaaaactattatgcgcgccggaaccgcgacggtgaaatatcccttcgcgccactggaggtcagccctggctttcgcggaaaaccggacctgatgcccagccaatgtattgcctgcggtgcctgcgcctgtgcttgtccggcaaatgcgctggctatccagaccgacgaccagcaaaatagccgcacctggcagctctatctggggcgttgtatttactgcggacgttgtgaagaagtgtgcccgaccagagccatccagcttaccaataactttgaactgaccgtcaccaataaagccgatctctatacccgcgcgacgttccatctacaacgttgcagccgttgcgaacgcccgtttgccccgcaaaaaaccatcgcactggctgctgaattgttagcacagcaacaaagtgcgccacaaaaccgcgaaatgttgtgggcgcaagcgagcgtctgcccggaatgcaaacaacgcgcgacgctgatcaacgacgatacagatgtactgctggtggctaaggagcagctatgagtccagtgcttacacaacatgtcagccagcccatcacgctggacgagcaaacgcaaaagatgaagcggcatttgctacaggatatccgtcgcagcgcttacgtttatcgcgtcgattgcggcggctgcaacgcctgtgaaatcgaaatttttgctgccattacaccagtattcgacgcagaacgttttggcattaaggttgttagtagtccgcgtcacgccgatattttgttatttactggcgcagtcacccgggcgatgcgtatgcctgcacttcgggcgtatgagtctgcccccgatcataaaatttgtgtttcctacggcgcgtgcggtgtcggcggcggtattttccacgatctctacagcgtctggggcggtagcgacaccattgtccccattgatgtttggatccccggctgcccgccaacaccggccgccaccattcacggtttcgccgtggcgctcggtttgctgcaacagaagattcacgctgtggattatcgcgatcccaccggggtgactatgcaaccgttgtggccgcagatcccgccaagtcagcgtatcgccattgagcgagaagcgcggcggctggcgggctatcgtcaggggcgagaaatttgcgatcggctcctgcgccatttaagcgacgatcctacaggaaatcgggttaacacctggttgcgcgatgccgacgatccacgtctcaatagtatcgttcagcaactctttcgcgtactccgggggttacatgactgaagagtgcggggaaattgttttctggacgctgcgaaaaaagtttgtcgccagtagcgacgagatgccggaacacagctctcaggtaatgtattacagcctagctatcggccatcacgttggcgtgattgattgtctgaatgtcgccttccgctgcccactgacggaatacgaagattggcttgcactggtcgaagaggagcaagcccgacgtaagatgctgggggtgatgacttttggtgagattgttattgacgccagccacaccgccctgttgacccgggcattcgcgccactggcggatgacgcgacgtctgtgtggcaggcgcgtagcattcaattcattcatctgttggatgaaattgtgcaggaaccggccatctatctgatggccagaaaaattgcgtgagaaggatttctcattaataaggactgttgatggctatgagtgacgaggcgatgtttgccccgccacaaggaataacaattgaagcggtaaacggaatgctcgcggagcggttagcacagaaacacggcaaggcgtctttattacgcgccttcatcccgctgccgccgccgttcagcccggtacaacttattgaactgcatgttctcaaaagcaacttctattaccgctaccatgatgatggcagcgatgtgacggcaacaacagagtatcagggcgagatggtcgattatagccgtcacgccgtccttctcggcagtagtggaatggcggagctacgctttattcgcacccacggcagtcgttttacttcccaggattgcacactgtttaactggctggcgcggataatcaccccggttctgcaaagttggctcaatgatgaagaacagcaggtggcgctgcgtttgctggagaaagatcgcgatcatcatcgggtactggttgatattactaatgcagtgctgagtcatcttgatctcgacgatctgatcgctgacgtcgctcgtgagatccatcattttttcggtctggctagtgtcagtatggtactgggcgatcatcgaaagaacgagaagttcagcctgtggtgcagcgatctttctgccagtcattgtgcgtgtctgccacgctgtatgcctggcgaaagtgtattgctgacacaaacgctacaaacccgacaaccgaccttgacgcaccgtgcagatgatctgtttctctggcaacgcgacccgttattactcttacttgcatctaacggctgcgaatctgcgctccttataccgcttacctttggcaaccatacaccgggtgcattgttgctggcgcatacctcttccactctctttagtgaggaaaactgccagctactacaacacatagccgatcgcatcgctattgccgttggcaatgccgatgcctggcgtagcatgaccgatttgcaggaaagtttgcagcaagaaaaccaccagcttagcgagcagctccttagcaatctgggcatcggtgacattatctatcaaagccaggcaatggaagacctgctccagcaggtagatattgtggcgaagagcgacagtacggtgttgatttgtggtgaaaccggaactggcaaagaggtgatcgccagagcgatccatcaacttagcccgcgacgcgacaagccgctggtcaaaatcaactgcgctgccatccccgccagtcttctggaaagtgagttattcggtcatgacaaaggggcgtttactggtgcgattaatacccatcgtggtcgttttgaaattgccgatggcggcacgttgtttctcgatgaaattggcgatctgccgttagaacttcagcctaaactgctgcgcgtattgcaggagcgggagattgagcgtctcggcgggagtagaacgatcccggtgaatgtcagagtcattgccgccaccaaccgtgatttgtggcaaatggttgaagatcgccagtttcgcagcgatctcttttatcgcctgaatgtcttcccactggaattgccgccgctacgcgaccgtccggaagatatccctcttttagcaaaacatttcacgcaaaaaatggcgcgccatatgaatcgcgcaattgacgccatcccgaccgaggcactacgccagttgatgagctgggattggccgggcaacgtgcgcgagctggaaaacgtgattgagcgggcggtactgttgactcgtggtaacagtctgaatttacatctaaatgtccgacaaagccgtttactgccgacgctaaatgaagatagtgcgcttcgcagtagtatggcgcagttactgcacccgacgacgccagagaatgacgaagaagaacgtcagcgcattgttcaggtattgcgagaaaccaatggcattgttgccgggccccgtggcgcagcgacgcgattagggatgaagcgcaccacgctgctgagtcgaatgcagcggctggggatcagcgttcgcgaggtgttgtaatctgcttttgcaggagtatgcatgagaaacaaactctctttcgacttgcagttgagcgccagaaaagcggcaatcgctgaacggattgccgcccataaaattgcccgcagtaaagtgagcgtctttttaatggcgatgtccgctggcgtgtttatggcgatcggatttactttttacctttccgttatcgccgatgccccgtctagtcaggcattaacccatctggtgggcggcctttgctttacactcggctttattttgctggcggtttgcggcaccagcctgttcaccagcagcgtaatgacggtgatggcaaaaagtcggggcgtcattagttggcgaacttggctgattaacgcacttctggtggcctgcggtaatctggcaggtattgcctgtttcagtttgttaatctggttttccgggttggtgatgagtgaaaacgcgatgtggggagtcgcggttttacactgcgccgagggcaaaatgcatcatacatttactgaatctgtcagcctcggcattatgtgcaatctgatggtttgcctggcgctgtggatgagttattgcgggcgtagcttatgcgacaaaatcgtcgccatgattttgcccatcaccctgtttgtcgccagtggctttgagcactgtatcgccaatttgtttgtgattccgttcgccattgccattcgccatttcgcccctccccccttctggcagctggcgcacagtagcgcagacaattttccggcactgacggtcagccattttattaccgccaatctgctcccggtgatgctgggtaatattatcggcggtgcggtgctggtgagtatgtgttatcgggctatttatttacgtcaggaaccctgaaaaatcagcccggcgaaacagttcgtcgggctgaagattattcttgcgcgatttgcccatcgggccaggcatgaatcacggctttgatcagcgtcgccaacggaatggcgaagaatacgccccagaatccccacaaaccaccgaagatcaccacgcttaaaataatcaccagcggatgcaggttaaccgcttcggagaacaacaccggcactaacaggttgccgtccagcgcctgaataatcagatacaccgcgaagcagctccagaattcagtacctgcgccaaactggaatagcgccacgccaaccaccggaatggtcaccacaaatgcgccaatgtacggaataagaacgctgaagccgaccagcactgccagcagcaggctatagttcagcccgaagagcaagaaccccagccaggtggcgatccccaccacgatcatctccagcactttgccgcggatatagttggtgatttgttgattcatctccttccacacctgtcctgccagcccacggttacgcggcagcacccggcgaacggcgttcagcatctgctctttgtctttcagcaggaagaagaccatcaatggcaccagcaccagatagacggctatggtcagcaaaccgaccaggctggcgagggaaattttcaccacgctatcgcccatggtcagcatccgactgcgcatattttcggccattgcatcaataatgcccgcgtccattaacgccggatagcggcgcggcaacgtggcggcaaagtcagaaagcttattgagcatccccggcatatcgcggattaagtagatgccctgttgccaggcgataggcagtaccacgaacgccatcagtagcaatataccgacgaaaaccaccaatacaatgctcgtcgcccagcggcgggagcagccaatagattgcagacgcacggttggccattccagcaaataggccagcacaatagccaccagcaacggagcaagcaggccactaaagaaaaagataatgccaaatccggcaactaaaataaccagcaaggcaatcgcttccgggtcgctaaaacggcggcgataccattgcatcaacatttcgagcataaagaccttccctgaacctcaagagcgggattgcgatccgcaattgtatcgaaatgtcacaaaaaagacttcgctttttatgacggattcaggaaactgaaaagtcatttgagtgggctaatcttcgccgttacactcaaaggcggcgcggtgggaacgatatttcacagtatcggtcaaatgactatctccagaaatacaggatagaggttatgttcaggcagttgaaaaaaaacctggttgcaaccctcattgctgctatgaccattggtcaggtagccccggcgtttgccgacagcgcagacaccttgccggatatgggaacctccgcaggaagcacgctttccattggtcaggaaatgcagatgggcgactattatgtccgccagctacgcggcagcgcgccgttaattaatgacccgctgttaacgcaatatattaatagcctggggatgcgtctggttagccatgccaatagcgttaagacaccgtttcatttttttctgatcaacaacgacgaaattaacgcctttgctttctttggcggcaacgtggtgctgcactctgccctgttccgttattccgataacgaaagtcaactggctagtgttatggcgcacgaaatctcccacgtcacccaacgtcacctggcgcgagcgatggaagatcagcagcgcagcgcgccgctgacctgggtcggcgcgttaggttctattttactggcgatggccagtccgcaggcggggatggcggcgctgaccggtacactggcgggaacgcgtcaggggatgatcagtttcacccagcaaaatgaacaggaagcggaccgcattggtattcaggtgctgcaacgcagcggattcgatccgcaggcgatgccaaccttcctcgaaaaattactcgatcaggcgcgttactccagccgcccgccggaaattttattgactcacccgttgccggaaagtcgtctggcagatgcccgcaaccgtgctaatcagatgcgcccgatggtggtgcagagcagcgaagatttctatctggcgaaagcgcgcacactggggatgtataattccggacgtaaccagctcaccagtgatttgctggatgaatgggcgaaaggaaacgttcgtcagcaacgagcagcacaatatggtcgtgctttacaggcgatggaagccaataaatacgacgaggcgcgtaaaacgctgcaaccgttactggcggcagaacctggcaacgcatggtatctcgatctggctactgatatcgatcttgggcaaaacaaagccaatgaggcgatcaatcgtctgaaaaatgcccgcgatttacgcaccaatccggtgttgcagctcaacctggcgaacgcttatttgcaaggcggtcaaccacaagaagcggccaatattctgaatcgctacacctttaataataaagatgacagcaacggctgggatttgctggcacaggcggaagccgcgctaaataaccgcgatcaggagctggctgcgcgagcagaaggttatgcgctcgccggacgactcgatcaggccattagcctgttgagtagcgccagtagccaggtgaaattaggcagcctgcaacaagcgcgttacgatgcgcgcatcgaccagttgcgccagctgcaggaacgctttaagccttataccaagatgtaattcgcattaaaggaagaacaatgaccaaacaggtaaaaatctaccataacccacgctgtagtaagagccgggaaacgctgaacctgctgaaagaaaacggcgtggagccagaagtggtgctctaccttgagacacccgccgatgcggcaacgctgcgcgatttgctgaaaatactggggatgaatagcgcccgtgaattgatgcgccagaaagaggatctttataaagaactgaacctggctgacagtagccttagcgaagaggcgctgattcaggcaatggtggataatccgaagctgatggagcgcccgattgtggtcgcgaatggcaaagcgcggattggtcgtccaccggagcaggtactggaaatcgtgggttaagatgtgctccatcgctagttgaagcacattgccggatgcgacgcttgccacgtcttatccggcctacgaatactatggattaacttcgcgtagttcggataaggcgttcgcgccgcatccgacaataaacaccttatttacaacttcagaatttctttcacaaacggaatggtcagcttacgttgcgcggtaatgctcgcacgatccaactgatccaacgtcataaatagcgtgcgcatttctctgtcgagccgcttcagcaagaaacgccccacatcttccggcagttcaaaaccacgcaaacgcgcgcgtaactgtagcgcctgcaacttatcttcatcagaaagtggctgcaatttgtagatctgcccccagtcgagtcggctcgcgagatccggtaatcccagattcaactgccgcggtggacgatcgccggtgatcaacaaccgtgttttgccgctttccagaattcgattgtagagatcgaaaatcgccatctcccacaactcatcgcctgcaatacactcaatgttgtcgatacagaccaggctcaaatgctccataccgtcgagcacttccggaacaaaccaggtgcgtttatccagcgggacatagcccaccgcatcgccacgctggctcaattccgcgcaagccgcgtgcagcagatggctgcgccccgcgccttcgcgtgcccagagatagatgtaaccgctatgttcctgacgcagcacgttttgcagcgcggccagtaaagaggagttatcccccggccagaaacttgcaaaggtttcgtcgtcaggaagataaagtggcaaagagagctgtgccggtgtgttcagagatacctcaaccaggatttcacaaaatcggctgaagtttaccacagaatcccatgatgtttgaaccgggcagcaacactgcccggtcggtacattatttgtctgttatatccgcgtcttctgcgtccagcaccacttcttcagggcgcagcacactgatcagtttgaagatcaaacttaagccgataccgacgatggtcgccagcgccataccttttaactccgccgcgccgatgtttaccttcgcgccactgacgccgatgatcaaaatcacggaagtcaggatcaggttctgtgctttgttgtaatccactttgctttcgatcaaaacacgaataccggaagcaccgatgacaccataaagcagcaggctaacgccgcccatcaccggcaatgggatcatctggatagcggcagccagtttaccgacgcaggaaagcaggatagcgaaaatcgccgccccgccgataacccaggtactgtaaacacgggtgatcgccatcacgccaatgttttctccgtaagtagtatttggcgtagagccaaagaagccggaaatcacggtgctcaagccattagcaaacatgctacggtgcagacctggatcgcgcagcagatcttttttgacgatattagccgttactaccaggtgccctacgtgttcggcaataaccactaacgccgctggcagaatagtcagaatggcaaaccactcgaagcgcggcgtatagagggttggcagcgcaaaccagtgagcattaataatcggcgtggtatcgacaattcccattgcgaaagagagcgcgtaccccaccagcacgccaattaaaatcgggataattgccaggaaaccacgaaacagcacggaacctaaaaccgtgaccgccagggtggtaatagagatgatgatggttttggagtctggcgtttgcccttcagccgggagtaaacccgccataccggcagctacgcccgccagctccagaccgatgacggcaacgattgcgcccattgccgcaggtggaaacagcacgtccagccagccggtccccgctttcttcacgataaaagaaaccaggcagaacagcacgccgcacataataaagccgcccagcgcgacttcataccctaacggcaacagtaacaataccggactaataaaggcaaagctggaaccaagataagccggaattttccctttacagatgaagagatacagcagcgttccaataccgttaaataacagtacagtcgccgggttaatatgaaataagacgggcaccaggacggttgcaccaaacatggcgaacaaatgttgcaaactaagcgggattgtctgtaaaagtggcggtctttcactcaccccgatagcacggcgcgtcatagtattatcctctgtattatgtgttataggcgctttactcaaaaaaaagccgactcttaaagtcggctttaattatttttattctttatttcgtaccaaagattttgtcaccggcatcgccgaggcccggaataatgtatccgtgctcgttcagtccctgatcaatgcttgcggtatacagttcgacgtccgggtgcgctttttccagcgcagcgataccttctggcgcagctaccagcaccagaactttgatgctgctgcagcccgcttttttcagcaggtcgatggtcgcgataacggaaccaccggttgccagcattgggtcaacgatcagcgccatacgctcatcgatgttagaaaccagtttctggaagtacggtaccggctccagcgtttcttcattacggtacataccgacaacgctgatgcgcgcgctcggaacgttttccagcacaccgtccatcataccaagacccgcacgcagaattggcacaacggtaattttcttacctttgatctggtcgatttctaccgggccgttccagccttcgatagttactttttccgtttcgaggtcggcggtcgcttcgtaagtcagcaggctacccacttcggaagcgagttcgcgaaagcgcttggtgctgatatcttgctcacgcatcagtcccagcttgtgtttgacgagtgggtgtttgacttccacgatcttcatactctttctcctttgaggggcagccacaaaaaaaatcgacggattatacctcctttcttcaaggcggcaatattcttttcgttgactttagtcaaaatgataacggtttgagataaagttattttatattcagatggttatgaaagaagattattccatccgaaaactaacctttaccctggcacaagtcttctttcgccgcgcgcctggggaaaagacgtgcaaaaaggttgtgtaaagcagtctcgcaaacgtttgctttccctgttagaattgcgccgaattttatttttctaccgcaagtaacgcgtggggacccaagcagtgaccgataaaacctctcttagctacaaagatgccggtgttgatattgacgcgggtaatgctctggttggaagaatcaaaggcgtagtgaagaaaacgcgtcgtccggaagtgatgggcggtctgggcggcttcggtgcgctgtgtgcattgccgcaaaaatatcgtgaacccgtgctggtttctggcactgacggcgtaggtaccaagctgcgtctggcaatggacttaaaacgtcacgacaccattggtattgatctggtcgccatgtgcgttaatgacctggtggtgcaaggtgcagagccgctgtttttcctcgactattacgcaaccggaaaactggatgttgataccgctagtgcggtgatcagcggcattgcggaaggttgtctgcaaagtggctgtagtctggtgggtggcgaaacggcagaaatgccggggatgtatcacggtgaggattacgatgtcgcgggtttctgcgttggcgtggtagaaaaaagtgaaatcatcgacggctctaaagtcagcgacggcgatgtgctgattgcactcggttccagcggtccacacagcaacggctatagcctggtgcgcaaaattcttgaagtcagcggttgtgatccgcaaaccaccgaacttgatggtaagccattagccgatcatctgctggcaccgacccgcatttacgtgaagagtgtgctggagttgattgaaaaggtcgatgtgcatgccattgcgcacctgaccggcggcggcttctgggaaaacattccgcgcgtattgccagataatactcaggcagtgattgatgaatcttcctggcagtggccggaagtgttcaactggctgcaaacggcaggtaacgttgagcaccatgaaatgtatcgcaccttcaactgcggcgtcgggatgattattgccctgcctgctccggaagtggacaaagccctcgccctgctcaatgccaacggtgaaaacgcgtggaaaatcggtatcatcaaagcctctgattccgaacaacgcgtggttatcgaataatgaatattgtggtgcttatttccggcaacggaagtaatttacaggcaattattgacgcctgtaaaaccaacaaaattaaaggcaccgtacgggcagttttcagcaataaggccgacgcgttcggccttgaacgcgcccgccaggcgggtattgcaacgcatacgctcatcgccagcgcgtttgacagtcgtgaagcctatgaccgggagttgattcatgaaatcgacatgtacgcacccgatgtggtcgtgctggctggttttatgcgcattctcagcccggcgtttgtctcccactatgccgggcgtttgctgaacattcacccttctctgctgccgaaatatcccggattacacacccatcgtcaggcgctggaaaatggcgatgaagagcacggtacaagcgtgcatttcgtcaccgatgaactggacggtggcccggttattttacaggcgaaagtcccggtatttgctggtgatagcgaagatgacatcacagcccgcgtgcaaacccaggaacacgccatttatccactggtgattagctggtttgccgatggtcgtctgaaaatgcacgaaaacgccgcgtggctggatggtcaacgtctgccgccgcagggctacgctgccgacgagtaatacccccgtaattaaagcgccagctctgccgctggcgtttttcaattcacctgtaaatcgcaagctccagcagtttttttcccccttttctggcatagttggacatctgccaatattgctcgccataatatccaggcagtgtcccgtgaataaaacggagtaaaagtggtaatgggtcaggaaaagctatacatcgaaaaagagctcagttggttaagcttcaatgaacgcgtgcttcaggaagcggcggacaaatctaacccgctgattgaaaggatgcgtttcctggggatctattccaataaccttgatgagttctataaagtccgcttcgctgaactgaagcgacgcatcattattagcgaagaacaaggctccaactctcattcccgccatttactgggcaaaattcagtcccgggtgctgaaagccgatcaggaattcgacggcctctacaacgagctattgctggagatggcgcgcaaccagatcttcctgattaatgaacgccagctctccgtcaatcaacaaaactggctgcgtcattattttaagcagtatctgcgtcagcacattacgccgattttaatcaatcctgacactgacttagtgcagttcctgaaagatgattacacctatctggcggtggaaattatccgtggcgataccatccgttacgcgctgctggagatcccaagtgataaagtgccgcgctttgtgaatttaccgccagaagcgccgcgtcgacgcaagccgatgattcttctggataacattctgcgttactgccttgatgatattttcaaaggcttctttgattatgacgcgctgaatgcctatagtatgaagatgacccgcgatgccgaatacgatttagtgcatgagatggaagccagcctgatggagttgatgtcttccagtctcaagcagcgtttaactgctgagccggtgcgttttgtttatcagcgcgatatgcccaatgcgctggttgaagtgttacgcgaaaaactgactatttcccgctacgactccatcgtccccggcggtcgttatcataattttaaagactttattaatttccccaatgtcggcaaagccaatctggtgaacaaaccactgccgcgtttacgccatatttggtttgataaagcccagttccgcaatggttttgatgccattcgcgaacgcgatgtgttgctctattatccttatcacacctttgagcatgtgctggaactgctgcgtcaggctagcttcgacccgagcgtactggcgattaaaattaacatttaccgcgtggcgaaagatagtcgcatcatcgacagcatgatccacgccgcacataacggtaagaaagtcaccgtggtggttgagttacaggcgcgtttcgacgaagaagccaacattcactgggcgaagcgcctgaccgaagcaggcgtgcacgttatcttctctgcgccggggctgaaaattcacgccaaactgttcctgattagtcgtaaagaaaacggtgaagtggtgcgttatgcacacatcgggaccgggaactttaacgaaaaaaccgcgcgtctttatactgactatagcttgctgaccgccgatgcgcgcatcaccaacgaagtacggcgggtatttaactttattgaaaacccataccgtccggtgacatttgattatttaatggtaagcccgcaaaactcccgccgcctattgtatgaaatggtggaccgcgagatcgccaacgcgcagcaagggctgcccagtggtatcaccctgaagctaaataaccttgtcgataaaggcctggttgatcgtctgtatgcggcctccagctccggcgtaccggttaatctgctggttcgcggaatgtgtagcctgatccccaatctggaaggcattagcgacaacattcgtgccatcagtattgttgaccgttaccttgaacatgaccgggtttatatttttgaaaatggcggcgataaaaaggtctacctttcttccgccgactggatgacgcgcaatattgattatcgtattgaagtggcgacgccgctgctcgatccgcgcctgaagcagcgggtactggacatcatcgacatattgttcagcgatacggtcaaagcacgttatatcgataaagaactcagtaatcgctacgttccccgcggcaatcgccgcaaagtacgggcgcagttggcgatttatgactacatcaaaagtctcgaacaacctgaataaccctatgccaatacacgataaatcccctcgtccgcaggagtttgctgcggtcgatcttggtagtaacagttttcacatggtcatagcccgtgtggtagatggtgccatgcagattattggccgcctgaaacagcgggtgcatctggcggacggcctggggccagataatatgttgagtgaagaggcaatgacgcgcggtttaaactgtctgagcctgtttgccgaacggctacaagggttttctcctgccagcgtctgtatagttggtacccatacgctgcgtcaggcgctgaacgccactgactttctgaaacgcgcggaaaaggtcattccctacccgattgaaattatttccggtaatgaagaagcccgtctgatttttatgggcgtggaacatacccaaccggaaaaaggtcgcaaactggttattgatattggcggcggatctacggaactggtgattggtgaaaatttcgaacctattctcgttgaaagccgccggatgggttgtgtcagctttgcccagctttattttcctggcggggtcatcaataaagagaattttcagcgcgctcgcatggcggcagcacaaaaactggaaactttaacctggcaattccgtattcagggctggaacgttgcaatgggcgcttccggtaccataaaagccgcccatgaagtgttaatggaaatgggcgagaaagacgggataattaccccggaacgtctggaaaaactggtaaaagaagttttacgtcaccgtaatttcgcaagcctgagtttaccgggtctttccgaagagcggaaaacagtcttcgttccgggactggcgattttatgcggtgtgtttgatgctttagccatccgtgaactgcgcctttctgacggggcgttacgcgaaggcgtactgtatgaaatggaaggacgtttccgtcatcaggatgtgcgtagtcgcaccgccagcagcctcgccaaccagtatcacatcgacagcgaacaggcccgacgggtgctggataccactatgcaaatgtacgaacagtggcgggaacagcaaccgaagctggcgcatccgcaactggaggcgctactgcgatgggccgccatgctgcatgaggtcgggttgaatatcaaccacagcggtttgcatcgccactccgcttatattctgcaaaacagtgacttgccgggttttaatcaggaacagcagctgatgatggcgacactggtgcgctatcaccgtaaagcgattaagctcgacgatctaccgcgctttaccttgtttaagaagaaacagttcctgccactgatacagctattgcgccttggcgtattactcaacaatcaacgtcaggcaaccaccacaccgccaacattgacgctgattactgatgacagtcactggacactgcgtttcccgcatgactggtttagtcagaatgcgctggtactgcttgatctggaaaaggagcaagaatactgggaaggcgtggctggctggcggttgaaaattgaagaagaaagtacaccagaaatcgccgcttaatactttgcgggccgacgagaaatgtcggcccgcattattcaggcactttcgcgaatgggttcgatttcattcagcgtatcaattaacggctgcggcttaccaataagataaccctgcatataatcgatccccaaagagagcaccgcctcgcggatctcttcgttttcaacgtactctgccactaccagcattttcttcattcgcgccaggtggcaaatgcttgccactatctgataatccagactattactcacaatattgcggataaaactgccgtcaattttaagcagatcggcattcacatttttaagccgcgcatagctggcgtagccggtgccgaaatcatcaatcgcaatctggcagcctaattcctgaagatgctgcaaggtgatttgcgcctgcttaacattggtcagagcattactttcggtgacttcaaaaataagttgccacgcttcaatctgatatttagccagcaactgactgacttcaacaggaaaacgagcctgacatacgctggttggagacagattaatagcaaaacggtgagcgggcatcttcgctctgttttcagccataaattgcagcgtatgctcaatgacccacatgtcgatactgctgcttaaaccaaattcgtgcgcgaccggcaagaagctatcggggctgatcagttcatcattctcacctttcatgcgcagaagaatttcatggtaaacatcaccacgcataccggtaatcggctgggccatcaggaaaaaatggttgtgttccagcgcctgctgtagtcgattcatcatcgcgactttatctttcaattcgcgttgcaaatacattgccccgcgacgctgcatattttccggggcgttggtcacgatggaaagttcggcgaccgtatttagctctcccagcagcaggtagatatgattcactgggctgcgcacatagcagtaactgacgccaatctgcggttgcatcggcatgccatcccaaaagaaacgaaattgcttgagatggctatccagtgcggtaatgcgctcctggtggctttctgtattcagtcgcagcgcgagatcgttaccgctaagctgataaacatcttcacccggttccagcaagggactcagccagtgagaaagtttttgcttgtattgaatccgcagcatgatgccatagttcttaaccagcatttccatgccagggatgcgtaaataacaaagcgcagaccagggggcatcacgcaacgcgcgattcagggcgcgaacatttggcagatgaaccaccgggtccacatacgcaagccgctgaatgcgtctgactaccgctctctgacgggttgccagtacagccatataattgacaataaaagagaataccagataactggaggaggttatggtcagctgcgtggtatagccaggataaatgggaatgtaattttgatagctgtggatgctgatcatcaacacgaccgcccagagcaggctaatcagcttataaccatagcgcatcgctccccacatcatcaggggcagcaataaactcaaggtataattggtgctaaaaattgtgcttttttcatttaacggcatgcataacagcaacaataaagcacctaatgccagtagccagagcgcgaactcttttttggtgactttggcatcaacctgctgttttaattggctataatagctacgtaaataaaatggatttcgcactacccgaatgatgaagtagcacagcgggacaccgatcagattacccaccagtaaggcctgataattgattaaagtcccgaggttaaaaggcatgacaccgaccagattttctctgctcgccagtaatcctacaaatgcagcaaactggaaaagtatcagaaacagcgttgcaggaaacacaatctgccagaatatacgctgggaaattaaacgggtatcaccatgactaacgttgttacgccggggagtaaagaccctgtaaccgccccaacagagaatgataatgataataaaattagccgttaaacttagcgtttcgtaaaaacccagctctgcatatttgcggacaaaaatccctaaggcgatccctggcaatgccgcccagctgaaaaacatcatcatgctgatcatcagtgccagaggcagataaaagagaaaaacctcaccggaagaaatatgcgcgaaagtattaatgtgggcgaaaatgggcaagattaaagaaggcaggaacagcggaagcccccaccatttatcacgtatttttatataagttgcattcagtttcatagatgctcagcagaatcccccacatcctgaaggaggtgtattcagacaggcatcccacctgacttcgaatgatgattattcatcactatagagagcattgattctaagtgtcatatgaaagtaccaattgatatatatcaaacaaaataaccctgattaatgaattattacgtttatcatgttaattcatcattattacatcatcattgtaaataattaaattaacttccataacattaaaatatgtatccactgacgcttttttacataacgaagaattgaccattttgtcctgttgtgccttaatgtaagtaccgtccacagcgtgggacatacttcaaggaaccttttgtgagtcaggcaaccagtatgcgaaaacgacaccgatttaacagtcgcatgacccgtatcgtactgctcatcagctttatcttcttctttggccgttttatctacagctccgtcggtgcctggcagcaccatcagagcaaaaaagaagctcagcaatccacactctccgtcgaaagtccggtacaacgttaacggttaccttctccactttcacagaacataacggcacttcgctgtcggatgcttttgctgtttgggattatcaaagcggcagatattctttcatcttaaattttacgtctttatcctgactgatgtttatcctgtttggctgcgaaataaatataaaattaatatatatgttgtaatgatatatttttataaattattccctgcgtgaattttaataaatttaatctatccctttatacgcaatacatttactttcctcttttgatgatcttaaatgtcttatttttcgtaatgtgtataacaaggaatagtgatgaaatttaaaaaatgtcttctgcctgtggcaatgttagcgagtttcactctggcaggatgccagagtaatgctgacgatcatgctgccgatgtttatcaaaccgatcaactgaataccaaacaagaaactaaaaccgttaatattatttccattcttcccgcaaaagttgccgtagacaactcccaaaataaacggaacgcacaagccttcggcgcgcttattggcgcagtcgctggcggtgttatcggccacaacgtcgggtctggcagcaattccggaacgacggcaggtgcagttggcggcggagctgtaggcgcggcagcgggttctatggtgaatgataaaaccttagtggaaggtgtttctttaacctataaggaaggcaccaaagtgtatacctctacccaggtgggtaaagagtgccagtttacgacaggtttagccgttgttattaccacgacgtataacgaaacgcgtattcagccaaataccaaatgtcctgaaaagagctaataatcaggaggagtcatgaagaaagtttttctttgcgccatcttagcctccttaagctatccggctatcgccagtagtttgcaggatcaactctctgctgtcgcagaagcggaacagcaaggtaaaaatgaagagcaaaggcagcatgacgaatgggtcgcggagcgcaacagggaaatccagcaagagaagcaacgtcgcgcaaatgcccaggccgccgctaacaaaagagcggcaacggcagcggcaaataagaaagctcgtcaggataaactggacgccgaagcctctgcggacaaaaaacgcgatcaaagttatgaagatgagctacgcagcttagagattcagaaacaaaaactggcgctggcgaaagaagaagcccgcgttaagcgagaaaacgaatttatcgatcaggaactgaagcacaaagctgcgcaaaccgatgtggtgcaatctgaagctgacgccaacagaaatatgactgaaggcggtcgcgatctgatgaaaagcgtgggcaaagcagaagagaacaaaagcgacagctggtttaattaatcgatgttagtaacttcaatcctataattcttgaagataaaaaaccctctgtagtaacagagggttttgttcattcatagtgcagggtcaaatcattcccactcaatggtagctggcggcttgccgctgatgtcatacaccacgcgggaaataccgttcacttcattgataatgcggttggaaacgcgaccgaggaaatcgtacggcagatgcgcccagtgtgcggtcataaagtcgatggtttcgacagcacgcagagagacaacccagtcatacttacgaccatcgcccattacgccaacggaacgtaccggcaggaacacagtgaacgcctggctgactttgtcgtacaggtccgctttacgcagttcttcaatgaagatggcgtcagcacggcgcagcaggtcacagtactctttcttcacttcacccagaacacgaacgccaaggcctggtcccgggaacgggtgacggtacagcatgtcgtacggcaggcccagctccagaccaatcttacgcacttcgtctttgaacagctctttcagcggttcaaccaggcccatcttcatctctttcggcaggccgcccacgttgtggtgagatttgatgacgtgtgctttaccggttgcagacgccgcagattcgataacgtcagggtagatggtgccctgcgccagccacttcacgtcttccagtttcagcgcttcttcatcgaatacttcaacgaaaacgcgaccgatgattttacgttttgcttccggatcgttttcgccagccagcgcactcaggaagcgatcttctgccggtacgtgaacaatgttaagaccaaagtgatcgccaaacatatccagaacctgctctgcttcgttgaggcgcagcaggccgttgtcgacgaatacgcaagtcaggtttttaccgatagcgcggtgcagcagcattgcggttacggaggaatccacaccaccagagaggccgaggatgactttatcgtcgcctacctgctcgcggatgcgagctacagcatcgtcgataattttcgctggcgtccacagggcttcacactggcagatatcacgcacaaaacgctccagcatgcgcataccctggcgggtatgagtcacttccgggtggaactgtacgccatagaagcgtttttcttcgttagccataatggcaaacgggcagctttcggtgctggctacggtgatgaagtcggacggaatagcggtaactttatcgccgtggctcatccagacatcgagcagcggtttaccgtctgcggtcagcgcatcttcgataccgcgaaccagtgcgctgtcgtttacgacttcaacctgcgcgtagccaaattcacgttcgttagaggcttcaacgtgaccgcccaactgcattgccatggtctgcatgccatagcaaacgccgaataccggtacgcctgcttcaaagacatactgcggcgcacgcggactgttttcttcagtagtactttccgggccgccggaaagaataatgccgcttggattgaagtcacgaatttgtgcttctgtcacatcccacgcccacagttcgcagtaaacacccagctcacgcacgcggcgcgcaaccagttgagtgtactgagaaccgaagtccagaatgaggatgcgatgcttatgaatgttttccgtcattgacgcttattccgaggcaagtgaaacagataatataaatcgcccgacatgaagtcgggcgaagagaatcaggagcccagacggtagttcggggactctttagtaatggtcacgtcgtgaacgtggctttcctgaatgcccgcaccgctgatacgtacaaactccgctttagtacgcagttcgtcgatagtaccacagccggtcagacccatacaggagcgcaggccgcccatctgctggtgaatgatctctttcaggcgacctttataggctacgcgaccttcgataccttccggcaccagtttgtcggcagcgttatcgctctggaaataacggtcagaggaacctttggacatcgcgcccagggaacccataccacggtaagatttgtaagaacggccctggtagagttcgatttcacccggagattcttcagtacccgccagcatggaacctaccatcaccgcgcttgcgccagcggcgatagctttggcgatgtcgccggagaagcgaataccgccatcagcgataaccggaataccggtgccttccagggcttctactgcgtcagcaacagcggtaatctgcggaacaccgacgccagtcacgatacgagttgtacagatagagccagggccaatgccgactttaaccgcactgcaaccagcttctgccagagcgcgtgcacctgcagctgttgccacgttgccgccgataatttgcagatccggatatttagcacgggtttcacggatacgttgcagtacaccttcactgtgaccgtgggaggagtcgatcagcagaacgtcaacgcctgcggcaaccagcgcgtcaacacgctcttcgttacccgcacctgcgccaaccgctgcaccaacacgcagacggccttgctcgtctttacaggcgttcggtttacgttccgctttctggaagtctttcacggtgatcatgccgatcaggtggaattcgtcatcaaccaccagcgctttttcaacgcgtttttcgtgcatttttgccagcaccacttcacgggcttcaccttcacgcacggtgaccagacgctctttcggcgtcatgtaaacgctaaccggctggttcaggtcggtaacaaaacgcacgtcacgaccggtgataatacccaccagttcgttttcttcggtaacgaccggatagcccgcaaaaccgttacgctcggtcagttctttcacttcgcgcagcgtcgtggttggcagaacagtctgcggatcagtcaccacaccagattcgtgttttttcacacggcgaacttcttctgcctggcgttcaatggacatgtttttgtggataaagccgataccgccttcctgagccagagcaatagccaggcgcgcttccgttacggtatccattgctgcggaaagcatagggatattcagacgaatagttttcgtcagctgggtgctgaggtcagcagtattcggcagaacggtagagtgagcaggaacgaggagaacgtcgtcaaacgtcagagcttctttagcgatacgtagcatgggcaatatctcgaccagagtggttaataaatattgccgcggcattatacagagcgtaaccgattgcatctacccctttttgcaaaaaatgcttgctatccccgaagggcgggttactatcgactgaataacctgctgatttagaatttgatctcgctcacatgttaccttctcaatcccctgcaatttttaccgttagtcgcctgaatcaaacggttcgtctgctgcttgagcatgagatgggacaggtttggatcagcggcgaaatttctaatttcacgcaaccagcttccggtcactggtactttacactcaaagacgacaccgcccaggtacgctgcgcgatgttccgcaacagcaaccgccgggtgaccttccgcccatagcatgggcaacaagttttagttcgcgccaatattacgctctacgagccgcgcggcgactaccagataatcgttgagagtatgcagccggccggtgaagggctgctgcaacagaagtacgaacagctcaaagcgaagttgcaggctgaaggtttgttcgatcagcaatacaaaaaaccacttccctcccctgcgcattgcgttggtgtgatcaccagtaaaaccggtgctgcgctacatgatattttgcatgtgttaaaacgtcgcgatccttctctgccggtgatcatctaccctgccgccgttcagggcgatgacgcgccggggcaaattgttcgcgccattgaactggcgaatcagcgcaatgagtgcgacgtattgatcgtcgggcgcggcggcggtagcctggaagatttatggagttttaacgacgaacgcgtagcgcgggcgatttttaccagccgcattccggttgtcagcgccgtcgggcatgagacggatgtgaccattgccgattttgttgccgatctgcgtgcgccaacgccgtctgccgccgctgaagtagtgagccgtaatcagcaagagttactgcgccaggtgcaaagcacccgtcaacggctggagatggcgatggattattatctcgccaaccgcacacgtcgctttacgcaaattcatcaccgattacagcaacagcatccgcagctccggctggcacgccagcaaaccatgcttgagcgcctgcaaaagcgaatgagctttgcgctggaaaatcaacttaagcgtaccgggcaacagcagcagcggttaacacagcggctgaatcagcaaaatccacagccgaagattcatcgcgcgcaaacgcgcattcagcaactggaatatcgtttagcagaaaccctgcgcgcacagcttagcgccacgcgtgaacgtttcggtaatgcagtaacgcacctcgaagccgtaagcccactgagtacgctggcgcgtggatacagcgttactactgctactgacggcaatgtactgaaaaaagtgaagcaagttaaagcgggtgaaatgctaaccacacgtctggaagacggctggatagaaagtgaagtaaaaaacatccagccagtaaaaaaaagccgtaaaaaggtgcattaagccagcacgaattcaacgcgttttttgcttatcaagccatgcccgtgctgacagaagtaatctactgcaccacaggcttttaacacctgcaacggttgatggcagtctggacaaagagctttcatttcaataaattccccgcaggatcggcaacgcgcatggccgttatcctgatcaagcacatgctgacattgtggacaatgcagttccatatgaattcctccggtagccattccctctacattcatagagggaatggcagataaaatacttacggataattatttatttttcttgatgtgcttcatcagacgcttacgtttacgcatctgggttggcgtcagggtgttacgcttattcgcatacgggttttccccttctttgaactgaatacgaatcgggcttcccattacgtccaggcttttgcggaagtagttcatcaagtagcgcttgtaggaatcaggcaggtctttcacctgattaccgtgaatcaccacaatcggcgggttataaccaccggcgtgggcatatttcagcttcacacgacgaccgcgtaccagcggcggttggtgatcttcaacagccatcgtcatgatgcgcgtcagcatagaggtccccacacgacgggtggagctgtcatacgcttcacgtacactttcaaacaagttaccaacaccactgccgtgcaaggcagagataaagtgcacacgagcaaaatcgataaagcccagacggaagtccagcgtttctttcacctgctctttcacttcctgactcaggccatcccacttattcaccacaatgacaagactgcgcccactattgagaataaagcccagcaggctgagatcctgatcggaaataccttcgcgcgcatcaatcactaacatcaccacgttggcgtcttcaatggcctgcaacgttttgattacggagaatttctctacagcatcggtgattttgccgcgtttacgtacgccagcggtgtcaatgagcacatactcacgtccatcgcgttccattgggatgtagatgctgtcacgcgtcgtgccaggcatgtcgtaaacaacaacgcgctcttcaccaagaatacggttagtgagtgtagacttacctacgttcggacgacccacaatcgccagtttgatcggcagactttgcgggtcgaagtcgtcttcctcttcttcttcgccgttctcttccgcttcaaattgcgcccagtattcagcgtcttcgtcgacttcctcttgcggtgcgagatcttccatccacggcagcagcacatgctccagcagacttaatacgccacgaccgtgagacgcggcgatcgggtagatttcacctaaaccaaggctgtagaaatcaaccactgcctgatcgggatccagaccgtcagttttgtttgccaccaggaaggtcggtttttcacgggagcgcagatgtttggcaatcgcttcatctgccggcatcaggcccgcgcgcgcatccaccataaacagtacgacgtccgcttcttcaatcgccagcaggctttgttccgccatgcgggtttctacaccgtcttctgtgccatcaatcccgccggtatcaatacagataaactcacggccttcaatttccgcacgaccgtacttacggtcacgagtcagacccgggaaatccgcaaccagcgcatctcgggtgcgagttagacggttaaataacgtggattttcctacgttagggcgcccgacaagcgcgaccacaggtaccatgtttaaagcctcatttttataaatcatcagacaacgcacgctatattcgcgtcgttgttaaaaacaggaaaacggcccctgtccaggagccgttttcaaagtgaacgacagagacgattaacgtgtaatagagtacacggttccgtcttttgcctggatcagcagtttgccgtcagcggcaaccggttcagtctggaaaccggaactatcaactttttgctgggcaacgaaacgaccatcttcgacgttaatccagtgcagataaccttcactgtcaccgaccaccaggttgccattatacagcaccggagaagtcagcaggcgatgcagcagatcgctttgtgtccacagcgtaacgccgccatcaatggtcaacgccatcacccggtcattttgatcgaccagatagatgcgattgccgtcgacgatgaaatcattcacgctacccagttcgcgtttccacataatctgaccactgcgcagatcaagcgccgtcaggttaccattataggccagcgcgaaaacaacgccgttaacaacgacgggagtcgtgtcaacatcgctcagacggtcaatttcggtagaaccggtcgcctgggaaatacgctgctgccaaatcatctggccctgttccatcagcactgcgctgacgcgaccattatcgccccccacgacggccgcaccaaaagccgttgtcggcgcagactcgccacgcaaagagaggctaggcatatcgaggttaactgtccatttgacagcgccgtcagcttcgttcagcgcttgtaactgaccgttactggtgtggattaacaccagaccgtcgctgaccaccgggcggctaagtgcttcacccgcgactttagtttgccatgccacagtaccatcgctggtattcagcgcgtaaacctgcgccttttcgctgccaatgtagacatgcccaccagacacggtcacaccgccagaaagtaatgcaggctctttagagaaccagccatctttctcggccaggctgacagaccagatttctttgccatcatccgcattcagcgcttttactaaaccagcgcggtccgctgcatagacaacgttgtccgccagtgccggatgaagattggaatagaagttgccaatgccgctaccaacggaagtgctccacgccgtggtcggcgtaaactggttttcaacggttggcaatggggacatctttaccacatcttcttcgctgttaaacaggctacagccgcttaaaagggtaacggaaagcagtcctggcagcagtaatttacgcaattgcatcgggtccctctcagatggacaaattattaattttcatctgcatcatttcgctcagtgccggagtaacatcgcttttcacgcctgcttcccatgcactacgcgcaccttgcttatcacctttgctcagcaatgcttcaccacgcaggtcggcaacaatggcagcccacccttcacctttgatggtatcaagggttttcagcgcggcatcagcctgcttgagctgtacctgaacgcgagcaagacgcagatttatcacggctttgagattttcatcgctcgtgtctgccagcccctgttgtaactgggcggcagctttctctagttcatttttgtcaacaaattgctgcgcaagttccaaagaagccagcgcaccataagtatttttattttcagcagcaaatttttccgccgccgggatgctatccggtttgccttcgctcactgcggtaaccgcattttgataggcaagagaagcggagcgtgcagaatcaacctgatggctgttccagtagcgccagccaatcagtgcgccaacgcccaaaatcaccccaacagccagtgctttgccattttcagcaaaaaagcgtttaaccgcttctacctggtcgttttcgttctcgtaaatttccacgctgtccttctccttccttaacccagtaacgtgcgcaaatgcgcggctacgctatcctgcgcaactgccgtttgctcaccagagcgcaaatccttcactactgctgtgccgttagccacttcagactcacccagcaccacagcaacgcgggcaccccatttatcagcacgggcaaactgtttcttaaagttgccgccgccgtggttggtcatcaatttcacgcccggtaattcatcacgcagacgctcagctaatgccatagccgcagattgtgtatcagcaccactagccaccaggtatatatcgacaacaggatcggctttaaattccggattaacggcctgtactaacaatacaagacgttcgaggcccatagcaaaaccgacagccggtgttgcacgaccgcccagttgttccacaagaccgtcataacgaccgcctgcacacacggtgccctgggagccgagactgttagtcacccactcgaaaacggtacggttgtagtaatccagaccacgcaccagacgctggtttacggtgtaagcgatccccgcgctctccagcagtttgcacagaccggcaaaatgctcacgagattcctcgtccagatagtcacctaatgccggagcgtcgttgagaagcgcctgcacttccggatttttactatccagcacgcgcagcgggttagtgtacatgcggcgtttgcagtcttcgtccagcttttctttatgctgctcaaggaatgccaccagcgcatcgcggtaattggcgcgtgcttccaggctaccgatagagttcagctcaagagttacgtgctcggaaatacccagcgcgcgccaccagcgggcagtgagcataatcagttcagcgtcgatatccggaccttgcagaccgaaaacttcgcagcccaactgatggaactgacgataacgccctttctgcggacgctcgtgacggaacatcggcccgatataccacagacgctgttcctgattgtacagaagaccatgctcgatgccggcgcgtacacagcccgccgtcccttcagggcgcagagtcaggctgtcgccattgcgatcctcaaaggtgtacatctctttttcaaccacgtcggtgacttcaccaatcgcacgtttgaatagcggggtctgctctacaatcggcaagcggatttcactgtaaccgtagctgccgagcacgtttttcagtgtgccttcaatgcgctgccagatggccgtttcgccaggcaggtaatcgttcatgccgcgaatggcttgaatgttttttgccacgtttattctctttctgaatataaaaatgaaccctcaacgcttccctcaatgtttcgggagccatgcgggttcaatcatacacgggaagcgaggcgcttcccatcacgttattatttttcaacctgctgaacgtcaattcgacgcgcttcgtccagctgactggctttcgcacgaatgcgtgcttccagctggtcgatcatatcgttgttgtccagacggtctttgcgcacgccatcttcatagaggccgcttttcttgttgccgccggtgacgccgagtgtagaaaccagcgcctcacctgggccattcaccacgcagccgataatgctaacgtccatcggagtgatgatatcttccaggcgttgctccagcgcgttaaccgtaccgataacatcaaattcctgacggctacaggtcgggcaggcgatgaagttgatccctcggctacggatacgcaggcttttcaaaatatcgaaaccgactttgatctcttcgaccggatcggccgccaggcttacgcgcagcgtgtcgccgatgccttcagacagcagcagacctaaaccaatggcggattttactgccccgctgcgcgcaccaccggcttcggtgatccccagatgcaacggctgatcgatctgttttgccagcaaacgataagactcaacagcgaggaagacgtcagacgctttcacgctgactttgaactgatcgaagttcaggcgatcgagatgatcaacatgacgcatggcagattccagcaacgcctgcggcgtcggttcgccatacttttcttgcagatctttttccaggcttccggcgttaacgccaatacggatcggaatgtttttatcgcgcgcacagtcaaccaccatgcgaatacgctcttcattaccgatattgccagggttaatacgcagacaatcgacgccgtattccgctactttcagcgcaatgcgatagtcgaagtggatgtcagccaccagcggcacgttaacctgctgtttgatgagtttgaacgcttctgccgcgtccatcgtcggtacggatacacggacgatatcagcgccaacgcgttccagcgccttgatttgattgaccgttgcttcgacgtctgtcgtacgcgtattggtcatggactgtacggcgatgggagcaccatcgccaatcggcacattcccaacgtaaatacgtgtactttttctacgttgaattggagcctggttatgcatgaaaaatctcccgcgttacccgtctgttactgcgccggactttgttcggcattgagggtcagacgcgcaacctggttagttctgataaaacgactcagatcgacaggtttcccttgatactggatctgtactgcggctggcgcaccaattttcagtttgtacggtgcctggccggttaagttcaaattaccgtctttacgctgcataccgctaaacaattttttaccggtagcatcagtgacctccagccagcaatcggcagtaaagttcatcaccagcgcattcggatcagccaccggcgtggtcacgccagcctgatcggttggcaacggcgcagcaccatctggcgttgttgctgccgttggtgccggggtcgcggcggtatcaacatttgcctggctagggctaacaaccgcattctgttgcggatcaacagctggtgctggcgcagttacggcaggtgtttgcgtgttggttgcggtagtatccacagacgctggcggcgtggacgttgtagccgggtctgtagttgtgctcgtatttaatggaacactctgcccctgctcgctattactgctcagttccgcgctagattgatcggccatagtggtgatctcttcctgctgagctttgcggtcttgccaccaccaggcaccgctcaggccgataaccacaaacaacaccagccaagtgaaggtcatcagccagccgtcgcgttttttgcggcgtttaccgagggaaaaactctgcatcggcgcaacttttgcagcccgaagtggagcctgcttttccagccctggcagcagttcttcttctggaatatgtaccagacgcgcataagagcggatatatccgcgcaggaatgtactagcaagatcggcgggtgccttatcttcttcaatgtcgcgtaccgtggaaaccttcaggcaaagtcgctcggcaacggcctgctgactaagtcctagttgttcgcgagcattacgcaggcgagcgccggtagtaagtgcttcattttggtcgtgcgtggcttcagtattcattcgctgcaggtacgtttaaatgagaattgagatgccggtgaaccatcatgctcacccacaccgcgaaacatccgttaagttaaccgttatcatacagtataagaccgtctgtgtgctcgtgacaaagcccacattcactaaggctaacttactgttgcatcgttacatactgccttaaagtcagcaaaaacgcaccgttaatattgaccagacaattgcaacttaatacttcattcataaaacattacgccacggtacataaagtaaccgtggcgtaatggctatcagaccgctttaatgtcgatggcttcaccctgcatccgtttacgcagggtacgtttcgtacggtcgataacatcgcccgccaactgaccacaggcagcatcgatatcatcaccacgagttttacgcacaatagtggtgaaaccgtagctcatcagcactttactgaaacggtcgatacggctgttgctgctgcgtccatacggcgcacccgggaacgggttccacgggatcaggttgatcttacacggcgtatctttcagcagttccgccagttggtgcgcgtgttcagtgccgtcgttaacgtggtcaagcatcacgtattcaatagtgactcggccctgattggcgttggatttctccagataacggcgcaccgcagcaaggaacgtttcgatattgtactttttgttgatcggcacaatttcgtcacgaatttcgtcgttcggcgcgtgcagggaaattgccagtgcaacgtcgatcatatcgcccagtttatccagcgccggaactacaccggaagtggaaagcgtgacgcgacgtttagacaggccaaaaccgaaatcatcaagcatgatttccatcgccggaacgacgttgttcaggttgagcagcggctcgcccatgcccatcatcactacgttagtgatcggacgctgaccggtgacttttgctgcgccgacgattttcgccgcacgccacacctggccgataatttcgctcacccgcaggttgcggttaaagccctgctgggcggtggaacagaatttacactccagcgcacaccccacctggctagagacgcagagcgtggcacggtcgtcttccgggatatacaccgtttcgacgcgctgatcgccaacggcgatcgcccatttaatggtgccgtcagaactacgctgttcttcaaccacttccggtgcgcggatttccgccacctctttcagtttgccgcgcaacactttgttgatgtcggtcatctcatcaaagttgtcgcagcaatagtgatacatccacttcatcacctgatcggcgcggaagggtttttcacctaaatctttaaaaaactcccgcatctgctgacggttgagatccagcaggttgatttttccatctttcgtggtgacgttttcaggtgtgactaattgttcagacatatgctattccggcctcgttattacacgttatggcccctggagggttgaaaaaagaaacgccccggtgagcggctgctcgtccgggggcgctgcattgtacaaattctggcgcacggatgccacgtttgcacgcggcatttacgaaattattaacgggtgcgcgggcacacttcgccttcgccaaagaaataagcgatttcgcgagcggcagattcgacggaatcagaaccgtgggtaccgttttcggtcaggctgtcagcgtaatcagcgcgcagagtaccagccagtgcgtttgccggattggtcgcgcccagcagatcgcggtgacgctgaacggcgttttcaccttccagcacggaaaccacgatcgggccagaggtcatgaattcaaccagaccatcaaagaacggttttccatcgtgttcagcataaaagccacgtgcctgttcaacggtcaggtgcagcattttggtgccaacaattttgaaccctgcagcttcaaagcgcgcaaagatattaccaatgacgttttttgctaccgcgttcggtttgatgatggaaaaagtacgttcaatagccatttttacctctgtaaattgttctgttgttgtctgtaccagcgtacgagatggcgcggattataatgagcaacagggccgttgactattgatgaaggtaacatttttttaaaataaaatgagttttagcaacaatcagggacaaaacagattattgcatgacaaatttcactgtcgcgatttgccccacgtcatccatcaccagcaattgataatcacctttatccgtcaaatgcagggtcacgttgcgcccgcgttcagttaacggttcgccattcagaaaccaccagcgttcacctgcccctccactactttgcaacggcaaagtcgcttccgctgcgcccggtaaacgtttaataatcgcgccatcgcgaacgcctgtcagctgcagcgggagctgggcatcgtgaccgtatggcgggcaacttgtgctggccggtggtaagcgcacagcgcgacgttcacttgcgggcagccagggttccagcggtagcggccagacatttatcatttcttgtcgcgcttgcgggcaatcagcggcaacacgtttgccattttcatccagccagatggggaaacgaatgccattaatgccttcctgctccggcagtaatagagttggcggctgactcccgtccagcagccaggttgccaggcggcggcgacagttaccgtcaccttccggcaaagactgtccgcccggccagcagataacgccacgagtgacactgttcgggcgcgggtcttccggcagattcgcactgcggctcagtaagatattattgacctgattcaacaatggtacggcactggcaaagccaaactgaccaacaacgggcgtgccgtccggtctgccagtccagatcccaatgacatagcgagcgttaaccccaatcgcccaggcgtcacgatagccatagctggtgcccgttttccatgccagtggggcgacgcgcggcaaggcactatccggcaagggttgcgcttcatcagccataatccggcgaatgatccacgccgccccgctgctcattaaaggccgttcaagcagcggatcgtcaggctgtaagcgcaatttgcctgccttgccgtggcgagcaaacgcggtatacgctgccgccatatcttccagttttgcaccagcgccgccgagaatgagactaagattcggcgcagcaccgttgggcaaatataacggcaatccaacattgcgtaactttgccgcaaaccgtttcggtccataggcttccagcacctgcacagcaggtaagttcaggctgcgcaccagcgcctcgctcatgctgatcgggccatgaaaaccgctatcaaagttacctggtcgataatcaccggtgcgccgggggacgtcttgcagcagacttgccgggtggatcaagccttcatccagcgccagaccataaacaaacggtttgagcacacttcctgggcttcggatgctattgaccatatcaacatgaccaaagcgactatcatcgttgagatcaacgcttcccacccagccgcgaacacgcatatcggtatgatcaaccacgatcatcgccagactgctgcgcggtggcaaccgccctttccagttttgcgccagttcttccagacgtcgttgaagaccggcatccaacgtagtagtgattttgtcgcttttgcttttaccgagcatcatgcggctaaacagcggtgccagttgcggcatttgtcggggggccagccagatgggttcttccctactctcttttacctgctcacgggaccacacaccttgcacggccatccgttcgagcactttattacgcgcggcttcggcacgctccggccaacgatccgggcgaagacggctgggcgcttgcggcaaaaccgccagcattgccgcctcggaatagcttaaattcgcagggctttttccgagataagcccaacttgccgcaccgatcccctgcaacgtaccgccaaacggagcgcggttaagatacaaggtcagaatttcacgcttagacagatgccattccagttgcaacgcgcgccagagctggcgaattttgccgccaaatgttttggggtgaggatcaagcagacgagcaacctgcatagtgagcgtgctgccaccggaaataacccgtccgctagtgagatcttgccatgctgcgcgcgccacgctgaatggattcacccccggatgcttccagaaccagcgatcttcataattgatcagcgcttcaaggtaacgtggagaaacatcttcgattgttaccggataacgccagatgccgtcagcatcggcgaagcgccagagcggcgtaccatcctgcgccacgaccactcgtgcgggattgacttcatgcagcggtagaggccagagtttatctgctccccacgctgcaagaaaaaggagaaagggcgcggctgccaacgttatccagcagccgcgtttggttaacaagcgaggcatttacggtctgacaatcagcagatcttcagccgcgccggtcgcccgccattggggaacatacatactttccaccatcggttgcggtacctgatacgttcccggcgtcaccgcccgcgccagatacaccagcgttaccggttggtattcatcaacggcaaccgccgccacaaagcgatcgtcacggaactcaatgtgcttaatgctcgcctgctgcatctggttcagtaagttctgcacttcgccaccactttgctccaggctggcgctaccgttcgccagattctggttttccagttccagacccgcaggcagcagatccacgactaacgcatccggcacgctgttactggcttttacctgcaaccacaccagcaccagatcgccgctacgtaagctgtccaggcttttgctcttaccatcagtaccaagaatatgacgctcgatttgcagcacattgttcgccggtaaaggtgcggattgcggataaccgctggcatccatacgcaaccataacggctgatcgccactgttgctcacctgcaaggtgacaagttgatcgctattcagattgctgttttgcgctttctcgcctgtcagctgctcagcactgaaagaggtttgcgcctgccatttaccgggtaaatcctgaatcgtacgggcagccaggaacaacgcgttactttcctgcgtgcttagccagcgttcaccaaacgcctgctggctaagtgtgttcagcaaagtgtactgctcatcgggtagcagtttattttcttccagcaaggagagcattaacgcgttgtcgcgcagactactaccgtaatcacccagccatatccgctcatcactattacgcggcgttttcagcgccagcgcaatcgcttcttcaccacgcgtcgcatcacccatggttttcagcgcaacgccaagttgcagcagcggtaaaccagaagcggcatctgcacgatgctcccagatttcacgcagcgcacccagcggagccttttgctgacgggccaacaccagcgcagcgtaagactgtacggcgaatttactggctttgagattatccgcgtacgggatgctcatcatgcccggatcttgtaaatagcgcagcagacgctcattaccccggttaatggcgtctgtcggcacgctgtaaccctgttcgcctgcgcggaccaggaaatccatcacgtaagccgtcagccagtactcttcgtcaccgtttttatcccacagcgcaaagccgccgttatcacgttgcatttgcagcaaacgggaaatgccgatatcgacgcttgcacggcgtttctcatcactgtcgcctttgatgcccaacgcctgcagttgggctgcgttggtataaagactcggaaacaggccgctggcggtttgctcaagacagccgtacggatacgcttttaactctttgatataacgtgcgatgttcagcggtggtttgccgctcaacaacaattgcccttccagcgtaacagggctgaagttttgcaatccatccgccggaatcgcccatgtctcaccaggctgtaacgccgtaccgtaattaaccgtttgtgccgggaacgccggacggacgccgattttccactgcttatgctgatcggcaacggtttcacccggtaacgctaacccgctaatggtggcctgaatttctccatcgccataacccggcaatgctcgcaccgggataaacagcgtagtacgcacacctggcgctaattcaacggctgcgggactatcgctgaccagttcaagcaaaccactggcggtcagggcaacgttcagtttttgcggtttatcggtaagattagtgatatccagcgtcagacggctggtatcgccactcgccataaagcgcggcatgttcagttcagcaatcaccggtgcggcaactatcactttactttcgttgctaccgaagtcatctgccgtccaggcttgcgccatgacgcgcaattcaccgttaaaatcgccaatcggcagtgtaacgctgccttcgccctgttcgttgagcgttaccggcagcgcctgctgcacgacaatattgacgtgattgaccggcggtttaccaccacgtttcagctcatcaccatcgccaccgaaacgcagagctgccagacgcccctgaccttcaataacctgaccgtaaatatcgtaaatgtctgcgccatagcgtttctgaccaaagaacgcctgccacggatctggcgtgacgtagtcagtaatattcagcacaccactatcaacggcagacaccagcacattcacctgtttaggcttctcgccatttttagtgctggctttaattttcacggttaatggttgattgggacgcatttttgctggtgtttccagcgccagatcgaggcgacggttttcatcgccaagcggcagatgcaacacaccaaccgcgcgttttggcgtcgcggagcgagatttatcgccaggacgtaccaccagcgtacttaaatacagatcatgacgattccaggttttatcgaccggaatcgtcagatccagcccttgagcccgaacatcaatctcttgccaccacagcggcccttcactggactcgaccatcgcataacctttacccgccgttggcgcggcgatatgcaacttaatggtgtcgccagggcgataactggctttatccagtttcagcgtgacacggtcgggtcgcactgcgccgctaccgtcgctgttgtcctgccagctatagccagcccagaaacgaacactactgaccgcttcattcggcgctttgacttccagacgataagcgccccactctaccggaaaactgaccttgccggtttcgtccgctttcagatccagagtttgttcattttcgatcagatctttttgatcaaactgactctgccagccttcatcttcactccagttccagtagtaatcgcggcgttcgcgaatcaggcgcacctgcaagccgctcacggcttttttcacgccttgcgcatcgctataaacgatgtcaaaagcggcgttactgccttcatcaacaatgggctgtttcaccgtgctgtcagtacgataatcgtaaacgcttttgctggcgaactgcggacggatccccggcaatgcatcggcaggccagatagcctgctcagcgcggcgcgtcaccgggcgaccgccgctttccagcaaactaccctggaaaataacctgtaatggggaatgcgtttccttccactggctttctgtagaaacttcgccgcgccctttatcatccagcgtcaactgaacttcatccagcgtgcgggaaagattttcggcagctatatcgccgaattcaaaaccaggtaaggcactcacagcttcacgcagtgggcgcaggaaaagttgcccttgcaaagtattaccattagcaggtgcaccatacaggtagtaccccaccacggagaatttcacttcatctttcggcgttagcggggttttctcaccggtcagattcagcgccatgcgctctggcataaaatcttcgacgtggaaatcccacatccgatactgattatcgcccgtgttagcgcgaatatgccacataccggttgccgcattgctatcgagtggccaggtaaagtggtagaggccattctccggctgactaacgacgctcctgagtacctgcccatcgggtttaatcacgtctaacttgatgggttgattgggcaacgctttaccgtctgcatcacgcagcaaaccattgaggattaccgtttcacctgggcgataaagatcgcgtgggccaaacatgaaaaactgtttgctatagcctggcgcgccagcaatgttaaattctgctaagtccagcgccggaagttttaaatcgagtagcgttgtctgaccgtctttacgcgccaacagtaatgccgcgtttttatcattttccagctgcacatgcccctgagcgtcactggttgcctgagtcagagtctgccctttctcatttaataaagagacttcaattccttgctgggccgcgccgttttccagactttgggtaaagatatccagacgattgtgataacggtgagcactaacgccgatatcacttaacgtaaacagcgtcgcgggattactgtaatcgtaacgtccagcctgattcatcacagccagatacacgcccgcctgctgaagcggtttgatatcgcccagcggcagcaataatttttcacgggtgttacgcgcaggattgagatcaaaccgtccggtgtagaccagatccgccatctgcagcagtttgtcactctgccagttcgccaggctattgcggtattcccattggctaatgaatgctggcagagattctggcttaacgcggaagaagttaacatcgacattattaacgttgagcgccattaccggcagcccttcaacgactttgccaggcagcaggctaccacggctggcaaaaccgacgctgggttggatgtcgcgggtagttatagttttttcgtaatctttactgaaggttgcgttgttgagtgctttgacctccttgccaatagtaacgatcaaatcacgtttcggttcgaggtggcgtaaacgtaactctttaagattatcactcagctcccaggcaccatccactttgccgcttttttttatcgacgacatgaataacgcgactgaaatcctgatccgggtcgagagggatggagaacgtcagcaccagcgtggctgcaccatcaagttggacttcagagagatccagcaatgtcagcaccttaccggcactctgttgggccagtttttgtctctccggcacggagagttttgcactactcgcgttttcactagaggccgctttagtaacttcagaaggcgcatcttttttcaccgctgttggcgcgttatcgttgttgtcgcaccctgccagcgccagcattagcatgcaggcggctacgcgtaactttttcatttttcatccctgccacaatggcccgttagcaacgtcgaataattattatgcgtgagaatttacgttatgtaattcagtatcacgcccatacaatccgaattttagtgagaattgtggctcagacagccaaatcagcctcttttgcttgtcgcttttcactaaacatccgacaatttagcctaaccccggcaaaaatggagatgcctatgtccacgacatggtttgtaggagccgactggctcgccgaacatattgatgacccggaaattcagattatcgatgcccgcatggcgagccctggacaggaggatcgtaacgttgctcaggagtatctgaatggacatattcccggcgcagtgttttttgatatcgaagcgctttctgatcacacttccccgcttccgcacatgctgccgcgcccggaaacgttcgccgtggcgatgcgtgaattaggcgttaaccaggataagcacctgattgtctatgacgaaggtaatcttttcagtgccccacgagcatggtggatgctgcgcacctttggtgtagagaaagtgagcattctggggggtggacttgcaggctggcagcgcgatgatctgctgttagaagaaggtgcagtagagctgccggaaggagagtttaacgccgcgtttaatcctgaagccgtggtgaaagtaaccgatgtattattggcaagccatgaaaatacggcgcaaattattgatgcccgcccggctgcacgttttaacgcagaagttgatgaacctcgcccaggtttacgtcgcggacatattcccggagcactgaatgttccgtggacggaactggtgcgcgaaggcgaactaaaaacgaccgatgaactggatgcgatattttttggtcgcggcgtcagctacgacaaaccaattatcgtcagctgcggctctggtgtaacggcagccgtggttttgttagcactcgcgacgctggatgtgccaaacgtgaaactgtacgacggcgcatggagtgaatggggcgcgcgggcagatttaccggttgagccagtgaaataagtattttacaggcaataaaaaaccgccgaatttggcggttttttattgctagtctggttcgcggcctttccagcaggttgacttgtgttacatgagcaacgcaggtgcttcacagcaaaacaatactcaccagtaactctctttttgtcaagcaaaagagagtaattattgtttatttagcgtattatcgacaccggccctttccgccgtgttcggtaataaaataacctggcttattagtccgaattcagacaaatataaataaatcctgctcaaaattaaaaattctaaccggtaaaagatattacttaaacatgtaaattcactttcctttaaaaaacaaaaaaccgccaaaatcaggcggttttttgttgctggtccggttcgcggcctttccagcaggttgtattaccgtagtaatgcaagcgcgtctcagcggagacaatactcgccagtaactctctttttgtcaagcaaaagagagttattattgttctgttagtgtattatccactgcggccctttccgccgtctcgcaaacgggcgctggctttaggaaaggatgttccgtggccgtaaatgcaggtgtttcacagcgcttgctatcgcggcaatatcgccagtggtgctgtcgtgatgcggtcttcgcatggaccgcacaatgaagatacggtgcttttgtatcgtacttattgtttctggtgcgctgttaaccgaggtaaataataaccggagtctctccggcgacaatttactggtggttaacaaccttcagagcagcaagtaagcccgaatgccgccctttgggcggcatattttagattatccgattctgtttaaagtcacgcaaaaaaccaccccagcgacgttcatagaatggcgcaatatgttcggtaataaagtggctaattcctttttccccttttttcacctgacaaatatcgattggttcatcgccaggtaatgtatcggtcgctacacttcccgtcgcctgaataatttcttcgatatcaccatcggcttcaatgccaataagtaaattaggctgtgcctcttcgttctctttaatactacaaataaaagcacgcttcaccggcttaatggttttaaataaggtggtgagactatcaatcatttgtgctggcggctctgcgacttcgcttaatatcaggctttcaccgccttccaggatttcctggctgctcagcggatttccctcttcaccaatcaacaaactgatttcacgcggcataaattctttaccggttggcagtttggcattaaggaagagcgtttcgccaagtgtcatctcaaacagcgtgcgaacgggcattacgacaaatgcctgttcgtcttcaaccgcctgttgaagtgcttctaagctggtgaaaaaaggaatgacgctggtgccgtcttctttttcccagtgctgtaaatcaagcgcgctatcttcaaccacagcctcgccctgcgccgccgtaccaggcacccagacggtggattccagtagagtacggaaaaaggccgggcggtgcgccggttcagttgctgctttttccagcaggtcttcaagttcgttttttgtttcggacataagaaccacaattcattcaacgttcggggcgcaaatgcctgatgcgctacgcttatcaggcctacaagggattcgcaatttgttgaatttgcagaatttgtaggccggataaggcgtttacgccgcatccggcatattagtttacgccgttaacagattagctatcgtgcgcacaccaagtcccgtagcgcccgcagaccactgttcaaccggcgctttacggtaagtcgcgctgcagtcgatatgcagccagccttgctgatagttctcaacaaagtggctcaggaagcccgccgccgtgctcgcgcctgccggatacgccgcgcttccggtattgttcagttcggcaaagttagacggcagctggctgcggtggaactccgccagcggcagacgccagaacggttcgttctcctgcgcggcactcgccagcaagcgaccggccagcgcatcgtcaaaactgaacagcgcgtgataatcattacccagcgcagttttcgccgccccggtgagggtcgccgcatcaatgatcatttccggtttctgcgcactggcatcaatcagaccatcggcaagcaccagacgcccttcggcatcagtgttcatcacttcaacttttttaccgttgcgataggtgatgatatcgcccagcttgaacgcattgccgctaatcaggttatccgcacagcagaggaacagcttcacgcgcttgttcagtccgcgcgtaatggcaaatgccagcgccccggtaaccgttgccgcgccgcccatgtcgctcttcatgctgtccataaacgcagtctgtttgatgctgtagccgccggagtcaaaagtgatacctttacctaccaggcacgcgtacactggcgcttctttatcgccagttgggttgtaatccagcgccagcaataccggagaacgttcactaccgcgtccgactgtgtgcagccccatataaccttgctcacgcagatcttcgcctttggtgatccgataagtcacacgatcgcccgcgacgttgctgatcagatcaacagcacgctgtgccagttggcttggtcccaattcttctgccggtgcgttgatggtgtcacgcacccagtcgatgatcatcaggcggttatccagttcctggcgctgggcatcgtccagatccggccacaccactttacgcgtgcctttcggggctttgtaaccttgccagaatgcccagcagcgatccgcatcccagccttcaccgcttaactgaacatgcttgatgcccagaccgtcaatcttgcgcgccgcacgctggatcagccccagatcgtctgccccgttcaaatgcagggtaatgccgtcattattaatgctgtaagttgctttttctccccagcgcgcgtcggcaggttgggtagagagggtaatcttcatcgcttctgtcattttagttatccttctttgtaaaagggccgccagttggcagccccaggatttttccgctaaatgattcgcgttgcaggaaggcggcaagtgagtgaagccccaggagcatagataactatgtgactggggtgaacgagcgcagccaacgcatctgcggcgtgaagcatgacgcggaaattattcggcctcgtccagccagactaacaaaatcgcttcgaggattttctcgttggatgcctgcgggtcgtcgtcgaaatcttccagatcgcaaatccactgatgcatatcggtgaatcgaaccgttttcggatcaagatcgggatacgcatcgtacagtgcttcgccaatttcgcggctatcggtccacttaagtcccatactaacctctgttaatgctcacgcgcatggttgatagtgtaacgcgggatttcgactactaaatcttcgtcggtaacgcgcgcctggcagcttaaacggctttccggctccagtccccaggctttgtccagcatgtcgtcttcctgctcactgctttccggcagactgtcaaaaccttcacgaacgatgcagtggcaggtggtgcaagcacaggatttttcacaggcgtgttcaatctcgataccgttacgcagagctgcgtcgagaatggtttcaccgctattagcttccagaacagcgccatcagggcagagatcctgatgaggcaaaataacaatctttggcatattaaacctcgtccacggaatggcctttcagcgcacgacgaacgctctggtccatgcggcgagcggcgaaatcctgggtttgtttgtctacgtttttaatcgcttgttcgatggcgtcaacatcatcgccctgcgccacttcactcaggtgagcggcagcatcgtcaatgacctgacgttctgcggcgcttaacagcgcggcatcagcagccagcgcgccgtgcagactttccagcacacgcgccgcttctactttttgttctgccagcattcgggcttttacgtcctgctcggcatagctcatactgtctttgatcatgctagcgatttcgctatcggtcagaccgtaagacggtttgacctgaatagacgcctcaacgccggtggatttctccatcgccgtcacgctcaaaagaccgtcggcatcgacctggaacgtcacgcgaatatgcgcaccgccagccggtagcgccggaataccacgcagcgcaaaacgcgccagactgcggcagtcctgcaccagttcgcgctcaccctgcattacatggatagacatcgccgtctgaccatctttaaaggtggtgaaatcctgagcgcgggccaccggaatagtggtattacgcggaatcactttctccaccaggccgcccatcgtttcgaggcccaggctcagtgggatcacatcaagcaacagcatttcgctgtctggcttgttacccaccagaatatccgcctgaatcgccgcgccaatagcgacgactttatccgggtcgatggaagtcagcggtggacgaccgaaaaattcgcctacccgttcacgcaccagcggcacgcgagtagaaccgcccaccatcaccacttccagcacttcatcagcttctacacccgcgtctttcagcgcgcgacgacaagccagtaaggttcgttttaccagtggcgcgatcagttcattgaattgttcacggctgatttcgccctgccagcccgcaacgttaacggtcacggagtccgcatcgctcagcgcgattttggctgcaatggcggcatccagcagttcacgctgaacgcggttatcgctacgatcaggaatgcccgcctgctcgcgaatgtaatccgccagcagatggtcgaaatcatcgccgccgagcgcggaatcaccgccggttgccagcacttcaaacacgccgcgacttaagcgcagaatggaaatatcaaacgtcccgccaccgaggtcataaacggcgatcacgccttcctgaccggaatccagcccgtaggcgatagccgcagcggtcggttcgttaagtaagcgcaggacgtgaaggcccgccagacgcgccgcgtctttggtgccctgacgctgggcatcgtcaaagtacgccggaacggtgataactacaccatccagctcgcctgccagggcttcagttgcccgcgccgccagtgctttgaggatgtccgcagaaacgcgcaccgggttcagcagccccgccgccgtttcaatcatcggcaggccgttttcgctggcctggaattgataaggcagatgcggatagcgttgctggatatcagccaggctgcgtcccatcaggcgtttaacagaactaattgtgttggcggtatcgagcgctgcattagtacgcgcgtcataacccacgctatgcccttgctgttgatagtgaacaacagatggcagcaggtgacggccttcatgatcggctaacgtttcggcctgaccgctgcgcactgtcgccaccaggctgttggttgtgcccaggtcaataccggccgccagacgacgctgatgcggcgcagcactcaaaccaggttcactaatttgtaataaggccatgtttagcttccagaaattaaaaatcgagcagtttttcttcgagttgttcggcactgcttcgcagtttatcgagaaaacgcagcttacgcacggtatccgccgccgcgtcccacgtctcgttgtctaactgttcaaccatcaactgatggcgggtatcaaacatctttttcacacgtttgataaagctttccagccgcgcttcatctttcgcctgttcgatctcgtccagctcttcgcgcagctccaactgttccatcaggaacgcggtgtcgcgcacagtatgctgctcgctggcgagatcaaagccgtgcaaagaaagcaaatattccgcgcgcattaacggatgacgcagcgtttgccaggcctggttaatggttgcagattgctgtacggcggcgagttgttccgcctggcttccgctggcgaatttatcaggatgatactgacgttgtagatcctgaaaacgcaggctcagcgcctgggtatcgagttgatagcgggcaggcaagccaaagagggtgaagtaatccataacattctcagggctgcgatccgccgcgataacggcgaatcaggtaaaacaaaccccacgcgcaggcgaccacggtggggttatcggtatgcgcatcaaacgtggaagctttcgccgcaaccacactcatctttgacgttcgggttggtgaatttaaacccttcgttcaggccttcttttacgaagtccagctgcgtaccgtccagaaattgcaggctcttgccatcgaccacgactttcacgcctttgtcttcaaacacgatgtcttccggcgtcggttcgtcaacaaattccagtacataagccataccactacacccggaggttctcacgcccagacgcaggccaaaccctttaccgcggttagccagaaaggtatttactcgcgctgctgcactgtcgctcagtgtaatgctcataaccaaacctcaactcttattttgcttcacgtttgcttttatagtccgcaatggcggctttgatcgcgtcttctgccagaatagaacagtgaattttcaccggcggcagttcaagttcttcagcaatatcggtgtttttgatcgcctgcgcttcgtcgagagacttccctttcacccattcggtgaccagggagctggaagcgatagcggaaccgcagccgtaagttttaaaacgcgcgtcttcaatgataccttcatcgttgactttaatctgcaacttcatcacgtcgccacaggccggtgcccccaccatgccgctgccgacgttctcgtcgttgttgtcaaaggaacccacgttacgcggattctcgtaatggtcgataactttttcgctgtaagccattataaattctcctgattccgataccgattaatgatgagcccattcgatgctgttcagatccacgccctgcttgtacatttcccacagcggagaaaggtcacgcagacgaccgatggatttacgaactaactcgatggtgtagtcgatctcttcttcagtagtaaaacgacctaaagagaaacggatagagctatgtgccagctcgtcgttcagccccagcgcgcgcagcacgtaggacggttcgaggcttgcactcgtacaggcggaaccactagaaactgcgaggtctttcagcgccataatcaggctctcaccttcaacgtagttgaagctgacgttgagaatgttcggcgcaccgtgttccaggtcaccgttcaggtaaacttcttcgatatctttgatgccgttccacagacggttacgcaggccgcgcagacgttccatctcggtcgccatctcttcttttgcgatgcgataggcctcgcccattccgacgatctggtgaacaggcagagtgccggaacgcataccgcgctcgtgaccgccgccgtgcatttgcgcttcgatgcgtacgcgcggtttacgacgtacatacagcgcaccgatacctttcgggccatagattttgtgaccggagaaagacatcaggtcaactttcaactggctcaggtcgataggcagtttacccacgctctgggttgcatcaacgtgatagataatgccacgagcacggcacatttcgccgatagccgcgatatcctgcaccacgccgatttcgttatttacgtgcatgatggacacgaggatggtgtcgtcacgcatcgctgcttcaagttctttcaggtcgataatgccgttacgctgcggtgccaggtaggtgacttcaaaaccttcgcgctccagctgacggcaggtatccagtaccgctttgtgttcggttttgctggtgatgatgtgcttgccttttttctgataaaagttggctgcacctttgatcgccaggttgtcagattcggttgcaccagaggtaaagacgatttcacgcggatcagcgccgaccagatcggcaatctgattacgggcgatatctaccgcttcttcagcctgccagccgaaacggtgagaacgggaggccgggttaccaaaggttccgtccatcgtcataaactgcatcattttctcggcaacacgcgggtccaccggcgtggttgcggagtagtcgagataaatcggtaatttcattgctctataaactccgtacatcactcaatgcaaggaatcaggctaccggctggatgtacgaccgtgtttacggagtatttagcactccggcctgattctgaattctttttattaagcgcgtaacttaacgtcgatcgcgtcttgtgtgcgggtgcgtggcgcgtcgtgagtatgctgacgaccagacacatccagcacttcctggttattaaccagttcgcctaaagtaatgttgttgagaaaaccggtgagacggtcgctcaaatcacgccacagcgcgtgggtcaggcatttatcgccgccctggcagccgcctttaccctgacaacgggtggcatctacagattcgtcaacggcgctaattacttcgccaacggcgatgctgctggcatctttgcctaacagataaccaccgcctggtccacgtacgctggaaaccagaccatttttacgcagacgggaaaacagttgttccagataagaaagggaaattccctgacgttcggaaatatcagccaacggtaccgggcccgcttcagagttgagcgcaacgtcaagcattgcggtcacggcatagcgccctttagatgtcagtctcatgtcttacttcacctcaaactcgcccctgcccggggttttttattgtaaaagtgggggtattgcatagcagggtcaagtctgacattcccgagtaaattggtcaactatttacttgactgatttagtcgggtatttaaccttcagtgccatttttttatcgtggcgtttgtacctgttgtcggatgcggcgtgaacgccatatccgccctggggttctgtacactgtaggcctgataagacgcattacgcgtcgcatcaggcaacggctgtcggatgcggcgtgaacgccttatccgacctacggttctgttcactgtaggcctgataagacgcattacgcgtcgcatcaggcaacggctgtcggatgcggcgtgaacgccttatccgacctacggttctgttcactgtaggcctgataagacgcattacgcgtcgcatcaggcaacggctgttattcggccttgttacctttattctgctgctcaatagaagccagaatcccgcgcaggatattcaactcctggctttccgggcgcgcacgggtaaacagacggcgcaatttattcatcacctgccccggatggttttcacggataaaaccggttgccagcagcgtttgttccagatgaccataaaaacgctccagatcatcgaccagcggatacggcgtctcttcatgctcgacctgctcgccgttttcctgagttgccagccaggccatgcgcacttcataggcaataacctgaaccgccatcgccaggttcaggctgctgtattccgggttagccgcaatcgcgacatgataatggcatttctgcaactcttcattggtcaagccgacgcgctcgcgaccaaacaccagcgccaccggggtatttgccgcttcagcgacgcttttcaggccgcattcgcgcgggtcgagcatcggccatggcagcgtgcgggaacgtgcgctggtgcccaccaccaggctacaaccggctaacgcttcgtcgagcgtatcgacgatgtgagcattaccaatcacatcgctggcccctgctgccagggcaatcgcctgggagtcgggtttcaccagtggattaaccagccacagattggttaatcccattgttttcatggcacgggcaacagaacccatattgccggtgtgactcgtctccaccagcacaattcgaatattttgcagcattgtctttcttcatctaaagattattcacgcatcttatcataaaacgaagacagatgccgatctcgctgctatactctgcgccgttttcccgttctttaacatccagtgagagagaccgatgcatccgatgctgaacatcgccgtgcgcgcagcgcgcaaggcgggtaatttaattgccaaaaactatgaaaccccggacgctgtagaagcgagccagaaaggcagtaacgatttcgtgaccaacgtagataaagctgccgaagcggtgattatcgacacgattcgtaaatcttacccacagcacaccatcatcaccgaagaaagcggtgaacttgaaggtactgatcaggatgttcaatgggttatcgatccactggatggcactaccaactttatcaaacgtctgccgcacttcgcggtatctatcgctgttcgtatcaaaggccgcaccgaagttgctgtggtatacgatcctatgcgtaacgaactgttcaccgccactcgcggtcagggcgcacagctgaacggctaccgactgcgcggcagcaccgctcgcgatctcgacggtactattctggcgaccggcttcccgttcaaagcaaaacagtacgccactacctacatcaacatcgtcggcaaactgttcaacgaatgtgcagacttccgtcgtaccggttctgcggcgctggatctggcttacgtcgctgcgggtcgtgttgacggtttctttgaaatcggtctgcgcccgtgggacttcgccgcaggcgagctgctggttcgtgaagcgggcggcatcgtcagcgacttcaccggtggtcataactacatgctgaccggtaacatcgttgctggtaacccgcgcgttgttaaagccatgctggcgaacatgcgtgacgagttaagcgacgctctgaagcgttaatgactcaggcgggtgatatcactcacccgccctcgcctttcaggcgctattccgaaatacttcctcactgctttactttctttcgtcactctcccaccatctttccccgattaatggatgataaagaagagccaaggaaaggttatggcactgccagtgaacaaacgcgttcccaaaattctgtttattctctttgttgttgccttctgcgtttatttagtgccgcgcgttgccatcaacttcttctattatcccgacgataaaatttacggtcccgatccctggagcgcggaatccgtcgaatttacggctaaggacggtactcgtctgcaaggctggtttatcccttctagcacgggccctgctgacaacgccatcgcaaccatcattcatgctcacggcaatgccggaaatatgtccgcccactggccgctggtcagttggttacccgagcgtaatttcaacgtttttatgtttgattatcgcgggtttggtaaaagtaaaggcacgccgtcccaggccggattgctggacgatacgcaaagtgccatcaatgtggtgcgccatcgcagtgatgtaaacccacaacgtctggtgctgttcgggcagagtattggcggggcgaatattctggatgttattggtcggggtgatcgtgaaggcatacgtgcggtgatcctcgactccacatttgcctcttatgcaaccatcgccaaccaaatgatccccggcagtggctacttacttgatgagagttacagcggcgaaaattatatcgccagcgtcagcccgatcccgcttttactcattcacggtaaagctgatcacgttatcccatggcagcacagcgaaaagttgtatagcctggcaaaagagccaaaacggttgatcctaatcccggatggcgaacacattgatgctttttccgatcgtcacggcgatgtttatcgcgaacagatggtggactttatccttagcgcgttgaatccgcagaactaacccatgatcgctagcacgataatcattcacaaaaccaccttaagacatgctaatccactggtcagaacagtttaagatgagaaaaattctgtgacgcttgccaacatttctgatgattagcattcccttcgccatttccttgagcaaactttagctattcttatcaattatgcttatgggagatctacagatgatgcctacgcttgctccaccatctgtccttagcgctccccagcgccgctgccagatcttgctgacgctctttcagccggggttgaccgccaccatggcaaccttcagcgagcttaatggtgtggatgatgatattgccagtcttgatatcagcgaaacaggacgggagatcctgcgctatcatcaactcacactgacgactggttatgacggtagctaccgggttgaaggtacagtgcttaaccaacgtttgtgtttatttcactggctacgacgtggtttccgtctgtgtccgagttttattaccagccaattcacccccgccctgaagagtgaactgaagcggcgcggaattgcgcgtaacttttacgacgataccaatctacaagcgttagtgaatctctgctcccgacggctgcaaaaacgctttgaaagccgcgatattcatttcctgtgtctgtatctgcaatattgtttgctgcagcaccacgctggaattacgcctcagtttaatccgctccaacgtcgctgggcggaatcctgccttgaatttcaggtagcgcaggaaattggacgccactggcagcgtcgggcgctccagcctgtaccacctgatgagccactgtttatggcactacttttttccatgttgcgggttcccgatccattgcgggatgcgcatcagcgggacagacaattgcgtcagtctatcaaacgtctggtaaaccattttcgtgagctgggaaatgttcgtttttatgatgaacaggggttatgtgatcagctttatacccacctcgcccaggcgttaaatcgcagtttgtttgccatcggtattgataataccctgccggaagagttcgccagactgtacccacgcctggtgcgcaccacccgcgcggcgctggccggatttgaaagtgaatacggcgtccatctttctgatgaggaaagtggtctggtcgcggtgattttcggtgcctggctaatgcaggaaaacgatctgcatgaaaaacagattattcttcttaccgggaatgatagcgagcgagaagcgcagattgagcagcagttacgcgaactaacgttactgccgctcaacattaagcatatgagcgtaaaggcatttttgcagacaggcgctccgcgtggcgcggcactgattattgcgccttataccatgccattaccgctctttagtccaccgctgatctatacggacctgacgctgacaacacatcaacaggagcagatccgcaaaatgctcgaaagtgcatgatcagcaactgggaacaactttcgggcgcaaaaacattgccggaagcgccaccagcgccattacccagaacacgccgtggcccagatattgatacaggaaaccggcgaaaacggtcatgatagcgatactgccgcccatcgcgacggcagagtaaaccgcctgtaaacggatgacttcgctaccctggcgagcagcaatataacgcatggcggccaggtggcagaccgtgaaggtgccgcaatgcagaatttgcaccactatcaaccacggcaacgccgtagttgctcccataatgccccagcgcactacgccgcaaatcgcgctgatcaacagcatatcgcgtgcactacaacggcggaaaagtttattactcagcgcaaagataatgacttccgccaccacgcccaggctccacaaataccccaccgcgctggcgctgtagccagctgcctgccagtaaatggcgctaaaaccgtaataggccgcatgtgccccctgcaataaacaaacgcaggccagaaagcgccagttctggcgaaccagcgccaaccacgcagaccaaccggtgctctcctgctggcgacttgccccttgtggctgaatcgtcggacggatgagaaagccgagcagcatggatgccacgcccaacgtcaacagcgcgaggatcacccgataatcaaacatagtgaccagtttgcccgtcagcgcgctgccaatgacaaacgccacgctgccccacagtcgcactttgccgtaatcaagcgggaactgcttttgccacgtattcgccagtgcatcggtcaacggtaccagtggactgaaaaagaggttaaagccaatcatcaccagcatcagccacgctacgtgcgcccccgcccagaaggcgacagcaaagagaagtgtcagcagtgccagcacgcgcaaggcggaaatcaggcgggaaggatcgctgacgcggggcgcgatgagcaaactcccgaggaaacgggcaaccagacctgcccccaataacaggccgatggtttctggcgttaaaccaatccctttaagccagacgctccagaaaggtagaaaaatgccgtaactaaaaaagtatgtgaaatagccgagcgccaaccagcgcgtggattgcaaaaccatgagtccctcccgtcaggaggcgttagtctggggttaatcgaatgttggtgcaagttgaaaaataagaatattcgagcctgcttcccgatgtctgtaacgccagttcacaagcactaaaaaactgagatccgcgacgcatgttgcaaaaataatgcgtaattatgccgttacgcttgccaaacgttcctgcacaatggcgatgaaatcgcgtaatgccggcttcatctcccctttcttccacgccatcagtaaagcaatggaaggcacatttccggcaatgggacgaaaaacaacctgtccggtattaaaattattcatataaccgggtatcaaagtgacgcccagccccatgcccaccagattcatggtcaccagaatattcgttgccacctggacgatatttggctggctgttttcttgcgcaaaccacgctttaacgatcggcgcaaggctaccggaatacaccggatcggtactgacgaaattcacgccatccagttgcgcggcggtgatctctttttcatgtgctaaagggtgatcaaccggtaacacaaccactaatggttcgtcaaaaagctccagataatcaatctccgggctataaacaggatggcgcattaagccgacgtcgagttcaccacggcgaattttttcctcctgttgcgtggtgattaaactcaccagctcaatcaaggtgtctggctgtctgagacgaaacatcggtaatacttttggcagtaaattcacttccgcgcttggcacaaagccaatggttaattgtctgtcttcctgaacaattttccgcgcccgtaatttggcattttccgcttgttcgaggattgccagcgcgtcctggagaaaacattctcccgccgccgtcaacgcgactttgcgcttatccctcaccagtaacggaacaccgacacagttttcaagatcgcggatctggctgcttaagctaggctgactggtatgcagtttttccgccgcacgggtaaagttcagtgcctgcgccactgcgacgaaatagcgtaaatgccgtagttccatcaccttccccttgttatcgaaaaaacgtctcagctggtagaaattaactatttcacatattagcaaccaaccagcaacatccttatggcacaaaaatagaaggtcaatacatcttatctttcaggattaaaaaatatgaccacacccagtgatttgaacatttaccaactgattgacacccaaaatggtcgggtcactccgcgtatttataccgacccggatatttaccaactggagcttgagcgtattttcggtcgttgctggctatttctcgcccacgaaagccagatcccaaaacccggtgatttctttaacacctacatgggagaagatgcggttgtcgtagtgcgtcagaaagacggcagcatcaaggcgtttctcaaccaatgccgccaccgggccatgcgtgtgagttatgcagattgcggcaacactcgcgcctttacctgcccgtatcacggctggtcttatggcattaacggcgagttgatcgatgtaccgctggaacctcgcgcctacccacaagggttgtgtaaatcccactggggactaaacgaagttccttgtgtggagagttataaagggctaatttttggcaactgggataccagcgcaccgggcctgcgtgattacctgggtgacattgcctggtatctggatggcatgctggatcgtcgcgaaggcggcaccgaaattgtcggcggcgtacaaaagtgggtgatcaactgtaactggaaattcccggcagagcagttcgccagtgaccagtatcatgctctgttcagccatgcttctgccgttcaggtattaggggcgaaagatgatggcagcgataagcgcctcggtgatggacaaaccgcccgcccggtgtgggaaaccgccaaagatgcgctgcaatttggtcaggacggtcacggtagcggtttcttctttactgaaaaaccggatgctaatgtctgggtcgatggcgcagttagtagctattaccgcgaaacctatgccgaagcagaacaacgtttaggtgaagttcgcgccctgcgcctggcgggtcataacaatattttccccacgcttagttggctaaacggcactgccacactccgcgtctggcatccgcgcggccctgatcaagttgaagtgtgggcgttctgtattactgacaaagccgcctccgatgaagttaaagccgcttttgaaaacagcgccactcgtgcttttggtcctgctggttttctcgagcaggatgacagcgagaactggtgtgaaatccagaaattgcttaaaggccaccgcgcccgcaacagcaaactgtgtctggaaatggggcttggtcaggaaaagcgccgcgacgacggcattcctggcattactaactatatctttagtgaaactgccgctcgtggaatgtaccaacgctgggccgatcttctgagtagcgaaagctggcaggaagtgctcgataaaaccgccgcttaccagcaggaggtgatgaaatgagtgcgcaagttagtctagagttacatcaccgcattagccagtttctctttcacgaagccagcttactggacgactggaaatttcgtgactggctggcgcagctcgacgaagagattcgttacaccatgcgcaccacagttaacgcgcaaacacgcgaccgccgcaaaggcgtccagccaccgacaacctggatttttaatgacaccaaagaccagctggagcggcgaatcgcccgtctggaaacgggcatggcctgggcagaagagccgccgagtcgcacccgtcacttaatcagcaactgccagataagcgaaaccgacatcccaaacgtatttgctgtgcgggtaaattatctgctttatcgggcacaaaaagagcgcgatgaaacattctatgttggaacgcgtttcgacaaagttcgccgtctggaagatgacaactggcgcttgctggaacgggatatcgtcctggatcaagcggtaatcacttcccataacctgagtgtactgttctgatgaatcgaatttatgcgtgtcccgttgcggatgtgccggagggtgaggctctccggatcgataccagccccgtcatcgccctgttcaacgttggcggcgagttttatgccattaacgatcgttgcagccatggtaatgcgagtatgagtgaagggtatctggaagatgacgccacggtggagtgcccgctacacgccgccagtttttgcctgaaaacggggaaagcgttatgcctgcccgccaccgatccgctcaccacttatccagtacacgttgaaggtggtgacattttcatcgacttaccggaggcgcagccatgagcgatctgcataacgagtccatttttattaccggcggcggaagcggattagggctggcgctggtcgagcgatttatcgaagaaggcgcgcaggttgccacgctggaactgagcgcggcaaaagtcgccagtctgcgtcagcgatttggcgaacatattctggcggtggaaggtaacgtgacctgttatgccgattatcaacgcgcggtcgatcagatcctgactcgttccggcaagctggattgttttatcggcaatgcaggcatctgggatcacaatgccagtctggttaatactcccgcagagacgctcgaaaccggcttccacgagctgtttaacgtcaatgttctcggttacctgctgggcgcaaaagcctgcgctccggcgttaatcgccagtgaaggcagcatgattttcacactgagtaatgccgcctggtatcctggcggcggtggcccgctgtacaccgccagtaaacatgccgcaaccggacttattcgccaactggcttatgaactggcaccgaaagtgcgggtgaatggcgtcggcccgtgtggtatggccagcgacctgcgcggcccacaggcgctcgggcaaagtgaaaccagcataatgcagtctctgacgccggagaaaattgccgccattttaccgctgcaatttttcccgcaaccggcggattttacggggccgtatgtgatgttgacaagccggcgcaataatcgcgcattaagcggtgtgatgatcaacgctgatgcgggtttagcgattcgcggcattcgccacgtagcggctgggctggatctttaaggaagcacgatgaaagaaaaaacgatcattattgtcggtggcgggcaagcggcggcaatggctgcggccagcctacgccagcaagggttcaccggtgagctgcatctgttttccgatgagcgacatcttccttatgaacgacctccactcagcaaatccatgttgctggaagattccccgcagttacagcaggtgttacccgctaactggtggcaggaaaacaatgttcatctgcattccggtgtaaccatcaaaacgctgggtcgcgacacacgagagttagtgttaaccaacggcgaaagctggcactgggatcagctttttatagcaaccggcgcggcagctcgaccgctgccgttgcttgatgcactgggagaacgctgctttaccctacgccatgccggtgatgccgccagactgcgagaagttctgcagcccgaacggagtgtcgtgattatcggtgccggaactattggtctggaactggctgccagcgccacgcagcgcagatgtaaggtgacagtgattgaactggcggcaaccgtcatgggccgtaatgcaccaccgcccgtgcaacgctatcttttacagcgccaccagcaggctggtgtgcgcattctgctcaataatgccattgaacatgtggtcgatggtgaaaaagtagaactgacgctgcaaagtggggaaacgcttcaggctgatgtggtgatttacggtattggtatcagcgccaacgagcaactggctcgcgaggccaaccttgatactgccaatggcattgtcattgatgaggcttgccgcacctgcgatcccgcgatctttgccggtggcgatgtggcaatcactcgtcttgataatggtgcactacaccgctgcgaaagctgggaaaacgccaataaccaggcgcaaattgccgctgccgcaatgttagggctaccgctaccgctactgccgccgccgtggttctggagcgatcagtacagtgataacttacagtttattggcgatatgcgtggcgatgactggctttgtcgtggcaacccggaaactcagaaggcgatttggtttaatctgcaaaacggcgtgcttatcggtgcggtcacgctgaatcaggggcgtgagattcgcccaattcgcaaatggatccagagcggcaaaacgtttgatgcgaaactgctgatagatgagaacatcgcgcttaaaagtctgtaaccaggataattagcgaatatctcaatgcctggggcgtggcgaggtgcaagagtgtgtattacgtttaaaagtcattatcttgcaaagggattggttatgaacacactacgttattttgattttggagctgcccgccccgttttgttattaattgcccgtatcgccgtggtcttaattttcattatttttggttttcccaaaatgatgggctttgacggtacggtccaatatatggccagcttgggcgcgccaatgccgatgctggcagcgattattgcggtagttatggaagtgcccgccgcgatattaatcgtgcttggctttttcacccgtccgctggcggtgctgtttattttctacacgctgggtacggcggtgattggtcaccattactgggatatgaccggcgatgcggttgggccaaatatgattaatttctggaagaatgtcagtatcgctggcgcgttcttgctattggcaattaccgggccgggggcaatttctctcgatcggcgttaagaaagatgccggatgcggcgtgaacgccttatccggcatttaataaattacagccactctacccgcaagctcatctcactagttgtactttcccctggtgctagcgcaatgagatcacccccttccgggcgatgatgatcatccggcgcatggctcatcggttccagacagaagaaatcaaacgcatatcctttatcaaacgcagggtcggaaacaaagatgaaataacacggtgcaggtggcgtcgtttccatgatgatggcataaccttcctgcggctgctcgatgcgggcctgaccattccatccggcaaaaccattgttcacccactggcgcggcaacggcgcgggctggttaaaatccagttcctgcggtagctgctcgcaaaactcacccgccagccactgctcccgctccagccagtaaccgctcgcctgtgcctgaatccgcgtttgcgggctcaacggaaaataaggatgccagccggtaccaaatggcagcgtctctgccccttgattggtgacagagagcgtcaccgtcagcgtatccgccgttaaatgaaacgcctgacttacccgatagtgatagacaccgctgcgatgttcatacaccagacacaaactatcatcgctgtggctgacacattgccactcgcccagccagccatcgccgtgtagatagtgcgcatcccactcaacattcggttgcagttgatactcacgcccctgccagacaaaacgattgccgctcacccggtttgcaaatggcaccagcggaaaacaactggcatcggttgccacaccgctttttttaccaggacgtaagagcggcgtcgtatcgcgccagaagccttcgattacgccgccctggtcagaaacgtccagctttaggctcccgtgggataaggtatagatggtcatccgctaactccttaatccgggaagttaatcacaactttcccgcatttgccgctcgccatcagcgcataggcatcacctgcctgttccaggctgaagcgatgggtaatggcgttacgcggccacagcttccagtccgtcagatcatgggcgcatttttccatatggaacagactggtcacccaggagccgataatccgccgttgatggtgcatcagatcggcgctgacctcgaattccacttttccggtttcaccaatgtaaaccacccgtccccagtcagcggtggattgcagtgccagcaagcgacctgcggcattaccggaacaatcgagcgcaacatccgcgccaccgtgggtgagttcggcgataatctgcggcagaccttcggtggttgctaaatagccgtgatccatcacccctaactgttttgccatcgccagacgttccggcagcatatcaacgccgatgatccgttttgcaccgcgacctttcgccagcatcatcgccatcatgccgactggccccagaccgaccaccagcacgttatcactgccggaaacttcgccgcgcaaaattccttcatacgctgtaccaacgccgcaactgataaacgcaccatcttcgtagctcagcgcatccggcaggaggatcagatctttttcttccgccagcaagtattcggcatgaccgccgtcacgctgccagccgtaagccgcttttccttcgccagtacaagaaataggaaaaccgcgacggcagttcgggcaaaaaccacagccagaaatgtgatacaccagcacgcggtcgccctctttaaaatggcggcagccttgccccatcgccacaatctgcccgcacggttcatgaccgttgataaagccctggtataacggtttatcgggtgccgccgctgtggcacggtgttgatgatagatatagtggacatcgcttccgcaaatcccggaggatttcattttgatcagtacctggttaatccccggcgtcggcaccgcaacttcccgcagatcgacggtgctatttcctggtaaataagctgccagcatcgttttcataaatccctcattaacaatacgattaattttcatccctgccgcacccgcgccaggggcgttaaggtttagcgtttcgctttactgcttcgctgggtcagcaagatattcgccagcaccgccaccacgatgatgacgccgcgtaccacctgctggaaaaaggagttaataccgagcagcaccagaccgttaccgattagcgtaatcaccagcacaccaagcaatgtaccgaacagggaaccgcgaccgccggaaagtgccgtaccgccgaccacgaccgcggcgatgacgtcaaactccagaccgtttgcggcacctgcgttaccagaaccgaggcgcgccgccaacaaaatgccggtcaccgccgctaataatccgctaagggtaaagataagaatgcgcacccgacgaacgttgatgccgcacaactgcgccgccgtagcattaccgccaacggcaaaaacgctgcgcccgaaggcggttttgcggctgatgaacacaaacagcgcaaacaacacaatcatgatcagcgcggataccggcacaccgagaaattgtccgcccagccagtccagcacctcgttttcatcaatcggcactggcagtgcgttcgtcataaacagccccattccgcgcagggcgctccacagccccagtgtggcaacgaaacttggtacattaaacacgccgcgcagcaccccggccagcgttcccatcagcgcgcctaacagcaacaccagcaggcacgccaccgccagcggaacttcaaattgcagcaaaaatgccaggcacacgctgacaaaagccaccatcggcccaacgctgacatcaatttcaccggagataataatcagcgtcatcgcccaggcggcaatcccaatggtggcggcatcgcgcagcacgttcatctggttattcaaactgataaagccaggcgcgttcagggagaagaccagataaagaatggcaatcaccaccagcaaaccgatctcattaatatggcgactgacaaattgtttgaggctgacgctcttgccctgcggcaatggtaaactgctagcagacatcttcaggttcctcggtaaaattcatcagtgcacagacagaatggcggacatcagctcatccacattgaccggagcgtgaaactcctggctgaacgtgccgtgctgtaataacaggatgcggtcacacaccagcggcaactcctccacttcactggagataaacaccacgctttttccttcggcagccagctcacggacaatacggtaaatctgctgtttggcttcgatatcgacgccgcgcgttggctcgtcgagcaacaaaatctggctggcagcatagacccaacgaccgatcaccactttttgctgattgccaccagaaagcgtgccgatgggtgtttcgctactggcggccttgaccgtcatccgctgcatcacctcttcggtcaggcggcggatggtggaccattgcagcacaccgttggcgctgattttttgccgattggtcagcactgtattttcgtcaacgcccaaccagggaatgatccccgcttctttgcggttttctggcgtatagccaatgccgcgtttcagcatgtcgccgtaatcggggcgcgtgattttctcgccgttgataacaatttcgccctgttcatactcctccagcccaacaatcgccttcagcaattcactgcgccctgcccccagcagaccagcaatgccgagcacttcgccacgacgtagcgtaaaactgatatcctccagcttgggcttatggcgtaacgcacggacttccagcacggcctgatccacaatttcctgaggggctaccggcgcaatatcaacgtgatcgcgcccgagcatcaggctcacaatatgatgcgtggaggtgttttcgagcatcacatcgcccgccacctgaccatcgcgcataacggtggcacaggaggcaatgcggcgaatttcttccatccggtggctgacataaatcaccgccacgcccagtgcgctcatctttttcaccgcgctgatcaccagttcaacttccgcactcgcaaggctactggtaggttcatcaagaatgaccacgcgcggctcgcccttcatcacccgcgcaatttccaccagctgcttttgcgccgggcttagcgtactaacaagttgttcaggactaacgtcaacgcccagcgcctgtaagcaacgttgggcatcctgcgccatttgcaggtaatcaatcatgccgttgcggcggggccactgaccgaggcagaggttttccgccactgtcagcccttccaccagacttaactcctgataaaccgcgcgcacccccagttcagcggcacggcgagtcagcgtagcttcgtcaccttccagtcgcgtctcgccaatccagatatcaccgctatccgggcgttcgctgccggtaagcattcgaatgagagtgcttttgcccgcgccgtttttacctaacagcgcacgaacttcgcctttattgagcgtgaagttaacgttatccagcgcaacgacgccgggataacgcttatttcctgccaccacttttgctaccgggactgcctctgttgccgtgaacatagggacctctgcgaatcagcgattagggcagaccatcaacgtgcgttgccagccactgtttaccgtcttccgttttggtatagagatcgataggcacctgaatcactttttcaccgtcggcttgtttattgataaccttcaatgtttgcgcgaaaacagcattgcccattttcttaccggaaatatccactaccgctttcagcacctgattgttttccagctcctgagcaatttcggttgtcatatcgctaccgaaaacagcaatttttccggcctgattttgattacgtaccgcttttaccgcgccgagtgtcgcaccgccgctttcccccataatggcgttgagatccggcgtggagataattagtttttcaccaacggaaatcgctttatctaaaacagtcccttcctgattagcgacaatttgcgcgccgggaacgcgggattttaaaacttcttcaaatcctttacgtcgctgcacacaaacttcaaaggcttcgcaattgatgacggcaattttcggctggtcaattttattggcaataaaataatcagcggcagcgttacccagttttttaccaaattccagcggatcgccgaccagatacgcgctgacatatttatcgacccccttttgattaatacaggtgttgtagcaaatcaccggaatgcccgcttcactggcgcgacgaacggtacggctactgccattttcagacactgcgcttaaaataatggcatcgacattacgcgccacgagggtatcaacaaaggtactttctttgctaatatcaccctgggcgttagtttctattaactgaacttgtacactggaatcttttgccgcatcctgaacgccctgacgcactccagcgtagtatccctgagtatcaaggtatattgcgccaatggtcatttctttttccgcagccctggcaaatagtgcgctacctaatagcgtagccattaataatagattacgggttgttctcatttttgtaggcatagagcctcctgtagggtttttattaacaacggcttattctaattattttgtgatgagcggcagcgcgtgccgctcaaatattacagttaatagggtttagtgaacgcggttaaaaataaaaggcatcacggtggtgaataatgccgctttcggccaagccggattaatcgccgtcaattcagcgcgagcagactcatattgcgcaacctccccgagtcccgcggacgccagcatcgccaccatcaggcatttttctttatgctgctgttgtaaatcgccatacaggctcaacaagtcaggttggctgacggcaaagaaatccgcttcgatactggttttcgccatctcttgcgcccactgtttcatttcactaaacagttgctgtgcggtttgttgttcgcccagcagtcgcagcgccatcccttgccagaagagataatcaaccggctgatcgttgtaataactgtgaatgttaatagtgcgatcgccggtcgccgccagacgtaaacaacgcgtcgcttcagtttcatcgccctgcgcgttggcgcatatcgcctgccagaaccagatgtcgttatcagtttgccccggtaaacggccttcgcttaaattctccggataatgcagcgcggcatgaagcagttcgcaggcctgctgcggctgtctggcatcaagatgctgccaggcgcgtaataactggttgaggataaactgactggtgaccttcccttccccgccttcccacgggtggaatttgcgcgtggcgagaatgtccgccgctttgtctgcctgacccgtgagatgccacaaattgagcagttctgcggtcatgtcgtcgcgtttcagcgcaatttccagattattttccagacgcgccagtcgtttctccggtgtggctccacttaacttatccagcaaatcccgttcgaaaagcagacgtgcatcctgcggcgcaagctgataagcattatcaagataacgcgcggccagctcataatcgtgttgcttattccacgcatggatcgctaacccgcgccagccgtcggcaaactccgggctcatctctacgcaacgttgccaaaaggcaatggctttgttgtagctacgtttgttgtagtagaagcaagctagtaaatggcgagcaaaccagcactcttcaatactctccagcgccgccacttcttccagcgtattcgggaaacggacaaactgcgggaagacatcaatggcttttgcgaccagttcgccacgttcggctttcggcagcaagctggcttgcaggtaaagcggcagcgtgcgctggcagtccagtgcgttcagcatctctgccgccagggtgggcattccccagttaatcagttgcccggcggtcatcagggcgttaacgtcgcgtccctgacacagaccgcgccactgcgcgagagcactttcgctacgaccatcgaaccagttcagccaccacagagtggcgttcagcggataatcgcgcagcagtttctcgcgctgcacacgcgcgttgtcctgacgaccacttaacaccagcagcagattatgcaggcaaagcacttcctgattggttgggcaggcgcgaagactttgttggcaaaaatccagaccagcgtcgaagttaccattacgcgccgccagtcgtgccaggccataatagccaccggctttgctgttgccgctccagaccgcacgccagaaatcctcttcggcttgttgatattgtccctgacgttcgtaagcactggcgcgaatcaaactcgcctgtccgcactgcggatttttgttcagcgcatgtgcgcgtttcagagcctgagtggcatacgccaccgcttgcgggaaatctgcgcggttatattccagcatcgccagcgccaggttacagcgataatccagcgggtccagcgccacgccgcgcaggtagtaatcgaacggactacggctggcgtgatgatattgctccagatgctgaccgataaaccaggcttcatctgtactggtaatgtcttgtgctgccagtggcgctttggcgacgtccggtaacggcaacgcttgcggctgatgttcctgataactcagtacaatattgccgtcggcatcggagagctcaatggtcagcctttcaggattgataccgtgcaacacgccctggatggcggtcgcaggcatcagtgccacggcatcatcaagtaacgcgttgcatttaccgatttcgcggatcgccaggcggtatccgttcaacggagagatggcatacagcccccactcaatcccccgcttactacgctggagttttatcaccgcatcgcgggaggcattttgcaccatgcccaaagaatgataaggcaggaaatactgctcaaaacgcttctcttcgtaagcatcaagccaggtaaaatcgggctggttatcggcaaaaataccggtcatcagttcgatatacgggccgttattgtcggtcagactcttatcccacgcctggccaaattcactgtgtccccaactccactgttttttacctggcgcaatatggtggttggcaacgtgcagcaaaccgccatcttcatcgtgacaccacgcgccgacaaaatcgtactggcttttttcggccatataactggttggaacaggcacatttttatagcgagaaatgtccactccagcggagtagtccactttgtagtaagtgccggtagcgatggggaaagcggagacggcccgtttgccgtgatcaaacaccgccgttacatccggcgggaagacgctctgatgcccttccccccctttcactgccgggttggcccaccacaagaaatgacgcggcgtggcgttcccgttatagacgcggctggcgatttccagcgccgcccggtcagggcgcagggtgaaacctgtcatcacctgtaaaccatgcatcggctccgtttcgcctacccacaccgtctgtgcaccgtcttcatgggcttcgagggtgaaatcaacgggcataaaggtggtcgggcgatgatgttgcggccagttaaactcaatcccaccggaaatccacggccccagcagccccaccagcgcaggtttaatgacttcattgtgataaacaaaatcgcgctgtttcactttatcccacgcgcgatgcacccgaccgcccagttccggcaggatcatcactttgatgtagtcgttttccagccacaccgcctgccaggatttcagggttttctgctcgctcagcgtatcggtcacgccgtagggataaaccgcgccggagcttccctgataaacgcgattttccaggaacatgggatgtatatcctgcggcccggtttcataggtcgggatctcaacgcgctcttgccacacttttactggagtcatggtgccctcaatattaacaagacatactgaattaaaagatttgtggcagtgtattgaacaatctggcaatgttttcgcggaataatcacgcaattaactaaacaaggtttagtgaagatgagagcctgcattaataatcaacagattcgccaccataacaaatgcgtgattctggaactgctgtaccggcaaaagcgcgccaataaaagtacgctggcccggctggcgcaaattagcattccggcagtcagtaatattttgcaggaactggaaagcgaaaaacgggtggtgaatattgacgatgaaagccagacgcgcgggcatagtagcggtacatggctgattgcgccggaaggtgactggacgctgtgcctgaacgtgacgcccaccagtattgagtgtcaggttgctaatgcttgtttaagtccgaaaggtgaatttgagtatttacagattgatgcaccgacgccgcaggcgctgctgtccgaaatcgaaaaatgctggcatcgccaccgtaaattgtggccggaccataccatcaacctggcgttggcaatccacggtcaggttgatcctgtgaccggcgtgagccaaaccatgccgcaagcgccgtggacaacgccggtggaggtgaaatatctgctggaagagaagctcggcattcgggtgatggtcgataatgactgcgtgatgctggcgctggcggagaaatggcaaaataatagccaggaacgggatttctgcgtgatcaacgttgattacggcattggcagcagcttcgtgattaacgagcaaatttatcgcggcagtttgtatggtagcggacagattggtcacaccatcgttaatccggatggcgtcgtctgcgactgtggacgttatggctgcctggaaactgtcgccagcttaagcgcattaaaaaaacaggcgcgggtatggctaaaaagtcaaccggttagtactcaacttgatcctgaaaaactgactacagcgcagttaatcgctgcctggcaaagtggagaaccgtggatcaccagctgggttgatcgctctgccaatgccattggtttgagtctgtataacttcctcaacatcctcaatattaatcagatttggttgtacggtcgcagttgtgcctttggtgagaactggcttaatactattattcgccagacaggatttaacccgttcgaccgcgacgaaggaccgagcgtgaaagcgacgcaaattggctttgggcaattaagccgcgcacaacaggtgctgggaattggctatttgtatgttgaggcgcagttacgacagatttgatggcgcgataacgtagaaaggcttcccgaaggaagccttgatgatcataaacgaaaaattgcctgatgcgctacgcttatcaggcctacacggagattgcaatatattgaatttgcaaagttttgtaggccggataaggcgttcacgccgcatccggcatgaacaacgagcacattgacagcaaatcaccgtttcgcttatgcgtaaaccgggtaacgtgcgcagatgtcgagaactttacctttgatgcgctcgataacggcttcatcattgatgctgtccagcacgtcacacatccagccagccagttctttcgcttcggcttctttaaagccgcgacgggtaatcgccggagtacctacacgaataccggaggtcacaaacgggctcttcggatcgttcggtacgctgtttttgttgacggtgatgttagcacggcccagagcggcgtctgcttctttaccggtcaggtttttatcaaccagatcaaccaggaacaggtggttatcagtgccgccggaaaccactttgtagccgcgctcgaggaacacttctaccatcgctttagcgtttttagcgacctgctgctggtaagttttgaactcaggctccatcgcttctttcagagcaaccgctttaccggcgattacgtgcatcaacggaccgccctgaccaccagggaaaacggcagagttcagttttttgtacagctcttcgctaccacctttcgccaggatcaggccgccgcgcggacccgccagggttttgtgagtggtggtagtaacaacgtgagcatgaggaaccgggttcgggtagacgccagcagcaaccaggcccgcaacgtgcgccatatcaacgaacaggtaagcaccgatgctgtcagcgatttcacgcattttcgcccagtccaccacgccggaatatgcagagaaaccaccgataatcattttcggcttgtgttctttggcttgtttttccagatcggcgtagtcgatatgaccggtagcatcgataccgtaaggaacgatgttgtacagtttaccggagaagttaaccggagaaccgtgagtcaggtgaccgccatgcgccaggttcatacccagaacggtatcacctggttccagcagcgcggtgtagaccgcaaagttagcctgggagccggagtgcggctggacgttagcgtagtcagcgccgaacagttctttcgcacgatcgatcgccagttgttcaacgatatcaacatactcgcaaccgccgtagtagcgtttgcccggataaccttcagcatatttgttggtcagctgagaaccctgcgcctgcattacgcgcgggctggtgtagttttcggaggcgatcagttcgatgtgctcttcctgacgtactttttcctgctccatagcctgccacagttcggcatcataatcggcaatgttcatttcacgctttaacatccgcatctcctgactcagctaacaataaaatttttggcctttataggcggtcctgttggacaacggcgaacagtataaccgaatcattgtgcgataacaggtcttgacaaaggaatttacgcaaacgattaccttcaggctacgcaaggctttggagaataaagagcttgcaaccggaaacggatttcttttcaggtttgtgatgcaaatttttcacttcatcacattctttctgaaaaacaccaaagaaccatttacattgcagggctattttttataagatgcatttgagatacatcaattaagatgcaaaaaaaggaagaccatatgcttgacgctcaaaccatcgctacagtaaaagccaccatccctttactggtggaaacggggccaaagttaaccgcccatttctacgaccgtatgtttactcataacccagaactcaaagaaatttttaacatgagtaaccagcgtaatggcgatcaacgtgaagccctgtttaacgctattgccgcctacgccagtaatattgaaaacctgcctgcgctgctgccagcggtagaaaaaatcgcgcagaagcacaccagcttccagatcaaaccggaacagtacaacatcgtcggtgaacacctgttggcaacgctggacgaaatgttcagcccggggcaggaagtgctggacgcgtggggtaaagcctatggtgtactggctaatgtatttatcaatcgcgaggcggaaatctataacgaaaacgccagcaaagccggtggttgggaaggtactcgcgatttccgcattgtggctaaaacaccgcgcagcgcgcttatcaccagcttcgaactggagccggtcgacggtggcgcagtggcagaataccgtccggggcaatatctcggcgtctggctgaagccggaaggtttcccacatcaggaaattcgtcagtactctttgactcgcaaaccggatggcaaaggctatcgtattgcggtgaaacgcgaagagggtgggcaggtatccaactggttgcacaatcacgccaatgttggcgatgtcgtgaaactggtcgctccggcaggtgatttctttatggctgtcgcagatgacacaccagtgacgttaatctctgccggtgttggtcaaacgccaatgctggcaatgctcgacacgctggcaaaagcaggccacacagcacaagtgaactggttccatgcggcagaaaatggcgatgttcacgcctttgccgatgaagttaaggaactggggcagagtctgccgcgctttaccgcgcacacctggtatcgtcagccgagcgaagccgatcgcgctaaaggtcagtttgatagcgaaggtctgatggatttgagcaaactggaaggtgcgttcagcgatccgacaatgcagttctatctctgcggcccggttggcttcatgcagtttaccgcgaaacagttagtggatctgggcgtgaagcaggaaaacattcattacgaatgctttggcccgcataaggtgctgtaatttgatgttgccggatggaaacatccggcaacccttgacgcggtttaaattgccgcgtcgtcctcttcaccggtacggatgcgaatgacccgtgccacgtcaaagacgaagattttaccgtcaccgattttgccggtttgcgccgtgcgaataatggtatcgacacaggtatcgacaatgtcgtccggtacgacaatctcaattttcactttcggcagaaaatccaccatatactccgcgccgcggtacagctcggtatggcctttctggcgaccaaagcctttcacttcggtcaccgtcatgccggtaataccgacttcggccagtgcttcgcggacatcgtccagcttgaagggttttataatcgcatcaatctttttcatgctattccttgaaaaggtcgcctgtcttttgatctgctaaacgtaacacataacgccaattcattccttgaaatcgtttgcatccagctcgtgtcgggaaagcagtttataaaattctgtccggttgcgccccgccattctcgccgcgtgggtgacgttgcctttggtgatttgcagcagcttacgcaaatagttgagttcaaactgattacgtgcctcaacaaaggttggcagcgccgtattttcaccctccagcgcctgctccaccagcgcatcactaatcaccggagaactggtcagcgccacgcactgttcaatcacgttgaccaactggcgcacattacccggccagctcgcggtcatcaggcgtttcatcgcatcggtagagaacgcgcggacaaacggtttatgtcgctctgccgcctggcgcaacaggtgatttgccagtagcggaatgtcttctgtgcgctccgccagtgccggaattttcaggctgacaacgttgaggcggtaatagagatcttcgcggaattccccgcgcgccatcgcttttggcagatcacggtgagtggcagaaataatccgcacattgatatcaatatcgcggttactgcccagcgggcgcactttacgctcctgcaacacgcgcagcagtttgacctgtaacggcgcaggcatatcgccaatttcatcgagaaatagcgttccgccttccgccgcctggaataaaccttcgcgattgctgacagcgccagtaaacgcgccacgcgcatgaccaaacagctcgctctccagcaattgctcgggcaatgcgccacagttaatagcaataaatggtttgctgttgcgcgggctggcgttgtggatagcctgggcgaaaatctctttcccggtgccgctctgaccgttaatcaaaacgctgacgtcactttgcgccaccagccgcgcctgttccagcaaacgcagcatcagcgggctgcgggtgacaattgcctcgcgccagcgttcatcggtggctggcgcggattgctccagcgcatcgtcaattgcctgatatagcgcgtctttgtcgacaggcttggtgaggaaactaaaaacgccctgctgtgttgcagcaacggcatcgggaatagaaccatgcgcggtaagaataattaccggcattcccggctgcactttctggatttcagcaaacagctgcataccgtccatttcatccatccgcaggtcgctgatgactaaatctactttttcgcgattcagtacccgtaatccttcagcgccactttccgccgtgaccacactgtagccttcgctggtcaggcgcaggccaagcagtttcagcaatcccggatcgtcatcgaccaataataaatgcgcaggtttatggctcatcaggagtgacctcatgggtggatggcgcgggcttttcactctcgtgcggcgtatccgggctgaaatttccagccggtttgcgggtgctgagctggcgttcaatatcggtcaggttttccagcttgcgggtggtgagttccagttgctgctgtagaacgtgatgttgctggcgcaatgtatccagctcgctgtcgctggactgctggagtttactgtaacgttggcgctcttccgccagttgcagttgcagcgcctgaccatcgcgccagagttgatacagtgggcgaacctgtgccgggatctcggtacttaacgcttcaatacgcgcgaccagctggcggcgctcatacggcgtaattttggcgtcggcgagcaaaatcccttgtttaaaggtattttgccagctgccgtcgtcatattggcgagcttgctgacggctctgcgcaggcattaaacgatcagcacaatccatcgcccgcagccagtaaagcggattggtttcggtacttttaccttgcagcgcccagatgtcgctacattcagtagaaagatagtcagccagttgataaaccggaattttttcttctgctggcgtatcaatggctggcttattgtgattctgcacgcaacccagcaatgccagacatggcagccctgccagccacagccgtcggggcaataatcgttgaaaaatgtgtcgcatattcaccagacttaaagcctatcccagtgggcgtaattgttgcagacagtctggacatggacagcgcggagaaaccggagcgtacatatcgtacgtgaagatttcgagcactgcccggggccgaactgacaaataaaatagcctgataggataggctgttagcattatttcgtgtttttgctgctcggtaattcaatgcggaaacaaacgtcttgcccgctctcgtcgaccagatacagttccccttgcatacggcgaatacaatccctggcaatgcttaatcccagaccgctgcccttcaccgccccttttcgctggtggcttccctgaaaaaagggttcgaagatcatggcgcgttcctcttgcggaatgggcgtgcctgtattgatgacatcaatataaacccgcgcaccatgtaaactgctgcgaaggcaaatgttaccggattcagccccgtagtgcaccgcattggagtaaagattatccagtacgctcatcagcagcattggctccgccaggcaagctgttgctttgagatcgacgtcggtatgcatcattttagcccgtgcgggcaggctatgagcagaaaccactgtctccaccagcggtgctaactcaacattctccagttccaccgcactgtccgcctgtttacggttgtaatcaagcagttgttcgatcagtttttgcaaattgcggctgctgctatcaagaatgctcaccacctctttttgctctggcgtaagcggcccgacaacctggtcagccagtaattcagtgccctcgcgcatactcgccagtggcgtttttaattcatgagataaatgtcttaaaaattgatggcgttgggattccagccaactcaggcgctcacttaaccaaagaatacgttgcccaacgctgcgtaactcgctcggtccactgaagctgacgctattgcccagagaacgcccttcccccagacggttgatcatgcgctcgatatttttcaccggcccgataatcatccgcgtgaaaagcagtaccattaccagactcaccagaaatagcaccaggctttgccaaccaaaatattgcccacgttcggcgatttcacgctgaagctgctgcccacgagagaacaccactgtgcgcgtggcctgtaccatttcggtattggcactggcaaaggcttcaagacgtgcggcggcggcagcatcgggaccgctgttgttacactgaagttgagccagattgtgcaaatcctgacgtaatgcctggtagagtttatcgtccggcagcacgcctgcgtgggcatcgagcatttcgctgtaacgcttgcgctggctttgataaaccttcgccagggttgggtcgtccagcacgcaatactgacggtaactacgctccatctccagcgccgcgttggtcatcgcttcactgcgccgggcatcaataagcgtagtgcggttaaccagcgccgcctgatcgctaagcgcattcaggctttgccaggcttgccatgccagcaccaacaggggcagcagaatcagcaaaaatgccagcattaccagttgtcgtaaactgcggggaaaaacgggccagcgtttcaaggtgttactctcgtcagacgcgaatagcctgatgctaaccgaggggaagttcagatacaacaaagccgggaattacccggctttgttatggaataaggcggtgcctaactcgacgtttcgcccgatggttgatatagctacgctgatatcagaagttggacggcaggcaccttgttgtgcgtcattcgtattttatgtagcacgtcccgaaggggctgacataagtcggtgaatgagccactggttactattatgcagtaactgtgccaataaagaaaatagtttggtaacgtactgattatacgttgctttgaggggtttatgtctcctccgctgtttgaatgtaaatcagccactgtgtcgctaaaaagagacaacttaagataaacttattagataatattaaaatcaatgagttaagtgtcgccagaaagcgacacggcaaaccacccattgtcgtgatttacagacacaaaaaagctcccggagttgggagcttatgatagtggttggtgcttaatgccgcatccgggctgcaaaaccaatgggctgacgacttaccccaactgcttacgcgcattgcggaaaatgcgcatccatgggccatcctcgccccagttttccggatgccaggagttgctgacagtacggaaaacacgttccgggtgcggcatcataatggtgactcgaccactttcagtcgtgactgccgtaataccgttcggactaccgttcgggttagccgggtaggtttcagtgactttgccgaagttatcgacatagcgcagtgccaccagccctttgctttccagtgccgccagatgcgccgcatcacgcacttccacgcgcccttcaccatgagagacagcaatcggcatttggctgcccaccatcccctgcaacagcagagacgggctttgggttacttcaaccaggctgaaacgcgcttcaaagcgatcggaggtattgcgcacaaaacgtggccacaactcactacctgggatcagttcacgcagattagacatcatctggcaaccgttacatacccccagcgccagcgtttgcggacggtggaagaaggttgcaaactcatcgcgtacacggtcattgaacaggatactcttcgcccaaccttcaccggcacccagcacatcaccgtaggagaaaccaccgcacgcgaccagggcgtggaaatcttccaggcccgtgcgtccggtcagcaggtcactcatatgcacgtcgatagcatcaaagcctgcacggtggaaagctgccgccatttcaacatggctgttcacgccctgctcacgcagtacggcaactttcggacgtgcgccagtggcaatatacggtgctgccacatcttcgttgatatcgaagctcagttttacattcaggcccggatcggcgtcgttagatttcgcctgatgctcctgatcggcacactccgggttgtcacgcaggcgctgcatctgccaggtagtttctgcccaccagacacgcaacgtggtgcggctttcgctgaatacagtctgcccgttggcggtaatcacaaaacggtcaccggaaaccgcctgccctacataatggacacaatcagcaagcccatgctgtgccagtacggactcgaccgcttcacggtcagcggcacgaacctgaatcaccgcacccagttcttcgttaaacaacgccgccaggcgatcgtcacccagagtggcgatatccgcgtcaatgccacaatgaccagcaaaggccatttccgccagcgttaccagcaggccgccatcagagcggtcgtgatacgccagcagcttacgctgtgcaaccagcgcctgaatcgcgtcatagaagcctttcagttgcgcgacatcgcgtacatctgccggtttgtcgccaagctgacgataaacctgcgccagcgccgttgcgcccagcgcgttattgcctttgcccaaatcaatcagcagcagtgcgttatcttcggtagaaagctgcggcgtgatggtgtgacgtacatcttccacgcgggcaaatgcagaaatcaccaggctcagcgggctcgtcatttcgcgctcttcgttaccttcctgccagcgggttttcatgctcatggagtctttacccaccgggatcgtcaggcccagcgccggacaaagctcttcgcccacggctttaacggcttcatacaggcccgcatcttcaccagggtggcctgccgccgccatccagttggcggaaagtttgatgcgtttgatatcgccaatttgtgttgcggcgatgttggttaacgcttcaccgaccgccagacgggcagaggcggcgaaatccagcagcgcaaccggcgcacgctcgccaatcgccatcgcttcaccgtagtagctgtcgaggctggcggtagtgaccgcgcagttagcgaccggcacctgccacggccccaccatctgatcgcgcgctaccatgccggttacgctgcggtcgccaatggtcaccaggaaggttttttccgccacagtcggcagatgcagcacacgtttcaccgcgtctgcaatggtgatcccttcacgggccagcgcgtcgcctttcgctttcagcgtttgtacatcgcgggtcatcttcggcgttttaccaagcaggacgtccagcggcagatcgatcggctgattatcaaaatgacgatcgtgcagagaaagatgcagttcttcggtcgcttcaccaatcaccgcgtagggtgcgcgctcacgcttacacagttcgtcaaacagcggtaattgatcggcagcaaccgccagcacgtagcgttcctgggattcgttacaccagatttccagcgggctcatgcccggttcgtcgcttagaatctcgcgcagttcaaatttaccgccgcgcccgccgtcgctcaccagttccggcatggcgttagaaagaccgccagcgccaacgtcgtggataaacaggattgggttggcatcaccaagctgccagcaacggtcgatcacttcctggcagcgacgctccatctccgggttgtcgcgctgtacggaagcaaagtcgaggtcggcatcagactgaccagacgccatagaagacgctgcaccaccgccaagaccgatgttcattgccgggccgccgagaacgaccagcttcgcaccgacgttgatctcgcctttttgtacgtgatcggcgcgaatgttgccgatcccgcccgccagcatgatcggtttgtgataaccgcgcagctcttcgccgttgtggctgttcactttttcttcataagtacggaagtagccgttcagtgccggacgaccaaattcgttgttaaacgccgcgccgcccagcgggccttcggtcatgatgtccagcgcggtgacaatgcgctcaggcttaccgaaatcttcttcccacggctgttcgaagccaggaattcgcaggttggaaacggagaaaccaaccagacccgctttcggctttgcgccgcgcccggtggcaccttcatcgcggatttcaccgccggaaccggtcgccgcgcccggccacggagaaatcgccgtcgggtggttgtgagtttcgactttcatcagaatatgcgccggttcctgatggaaatcgtagcggcccgtttcgtggtcagcaaagtagcggcccacttcagaaccttccattacggcggcgttatctttataagcagagagaacgtgatctggcgtggtttcgaaagtatttttgatcatcttgaacaggcttttcggctgctgttcaccatcgataacccagtcggcgttaaaaattttgtggcggcagtgctcggagttcgcctgggcaaacatatacagttcgatgtcgttcgggttacgaccaagctttgtgaaagcatcctgcagatagtcaatttcatcttccgccagagccaagccaagacgcaggttagcgtcgatcagcgcctgacggccctgccccagcaaatcaacgctggtaaccggagtcggttgatggtgggcaaacaactgctctgcatcatctaaagcaaaaaagaccgtttccatcatgcggtcgtgcagttcagcggtaacctgctgccattgttcattggtcagcgtaccggcttctatatagtaagcaacgccgcgctcaaggcggtttacctgttgtagcccgcagttatgggcaatatcggtcgctttgctagaccagggagagatggtgccaggacgcggggtcaccagcaggagtttgccttgcggggcgtggctggcgagtgccgggccatatttcagcaggcgttcaagttgtgcgtgctcatcatcgtttaacggcgcattgaggtcagcaaaatggacatactcggcgtaaatattgtgaaccgggagcctggcagcctgaaaacgtgccagcagtttgttgattcggaatgcgctcagtgcagggctaccacgcagaatttccatcataagtctctcgtcttctaagctttcggtgtacccaagggggggaaacgggcgtcattataaagaatctgatgcgctgacgaaaccgtttgcgtggaaataaaatcaccatcgtgaattagcaacgcgtgccgccaatggctgtaataagttgccatctggcgcaggtttacgcaaaatgccgctcatttatgagtaaacctttcactattattacgttttttcaagctgggacgcgcacgacacagagaattaactaattgaaaaaattaaagattaattatctgttcatcggcattctggcactgctgctcgcggtcgctctctggccatccattccctggtttggtaaagccgacaaccgtatcgccgccattcaagcgcggggagagttgcgtgtgagcaccattcatactcccctgacttataacgaaatcaacgggaaaccttttggcctggattacgaactggcgaaacagtttgccgattacctcggcgtaaaactgaaagtgaccgtgcggcagaatatcagccagctgtttgacgaccttgataatggtaacgccgacctgctggcggcaggacttgtctataacagtgagcgggtaaaaaattatcagcctggccctacctattattccgtgagtcaacaactggtttataaagtgggtcagtatcgcccacgtacgctgggcaacctgacggcggagcaactcaccgttgcaccgggtcatgtggtggttaacgatctccagaccctgaaagaaacaaaattcccggaattaagctggaaggtagacgacaaaaaaggctctgcggaattaatggaagatgtcatcgaaggaaaactcgattacaccattgctgattctgtcgccatcagcctgtttcagcgcgttcacccggagctcgccgtagcgctcgatatcaccgatgaacaaccggtgacttggtttagcccgttagatggcgataataccctttccgccgccctgctcgacttcttcaacgaaatgaatgaagacggtacgctggcacgcattgaagagaaatacctggggcatggcgatgattttgattacgtcgatacgcgcacatttttacgcgccgtcgatgcggtactgccgcagttaaagcccctgtttgagaaatacgccgaagaaattgactggcgtttgctggccgctattgcttatcaggaaagccactgggatgcacaggccactagtccgacgggtgtgcgcggcatgatgatgttaaccaaaaataccgcgcaaagcctcggcattacggatcgtaccgatgccgaacagagcatcagcggtggcgtgcgttatttgcaggatatgatgagtaaagtgccggaaagtgtgccggagaacgagcggatctggtttgccctcgctgcgtacaatatgggctatgcgcatatgctggatgcccgcgccctgacggcaaaaaccaaagggaatcctgacagttgggctgacgcaaaacagcgtctgcctttacttagccagaaaccctattacagcaagctgacttacggctacgctcgtggacatgaagcctacgcttatgtcgaaaatattcgtaagtatcagattagcctggtgggttatctgcaagagaaagagaagcaggctacagaagcggcgatgcaactggcgcaggattatccggcggtaagccctacggagttgggcaaagagaaatttccttttctcagctttctttcccagagcagtagtaactatttgacccattctccctctctgctgttttccaggaaagggagtgaagagaaacaaaattaatccgtgctggattgcgcttttttctgcgctttaatttcctggcggcgcatgcgaaagaagtcactgagcaacgccgcgcactcatccgccagtattccttccgtaatttccactcggtgattcatacccggatgatgcagcacatccattaaagatcccgcagcgccagttttcgcgtcacgcgcaccaaagaccacgcgaccaatgcgactgtggatcatcgctccggcacacattacacatggttcaagcgtgacatacaacgtggcgtcgatcagacgataattttgcatcaccagaccaccctgccgcagggccatgatttctgcatgtgcggtgggatcatggcgaccaatcgggcggttccagccttcgccgattacccgattgttatgcactaataccgcgccgaccggcacttcccgctcatcccaggcacgtttcgccagcgtcagcgcgtgacgcatccagtattcgtggctaaattcgacttcagacaaaaagaaaactccggttataaaagcgcggcgcattatacacggacgctatgctttactttattccagttgctggagttcaccgcgcggggttactcgccaacgatgctgacagaaataaagcagcggattgtcctgattactgtcgctatagccactgtacagccgcagcggagtgccgattttgcgctccagttgtgcgaccttttcatgtcccagacaacgcatcgtcaatacccaaccaccatagccacgctgaatttggctggcgataagattaacccgcggcagccagggcgtatcgaaataaaccgcttcaaccagcggctgcggagagccggtaatcaaccagatatcagcatcggaacttaacaggtaggtggttaatcgctcctgaaccagcggaaaggcggtaacattgtcgcgaaaccagcgcacgaaatcggcctgcaacgtctgtaaacgtgcttcgctgtgaccaaaagtgcacccccacagaagcagactcatcggccagcgtgccgcacgaccttttatcaataacgcaatggctataatcggtaacaacggcaggacaagtaacgcattcagcggttggcgacgtagtaaatagcgcagaaaactgccgaacatatcctgctgatgcaatgttccatctaagtcaaaaaacaccacacgacgctcgtgagttgccaaaccatattcctctggactgaaacatcctgattaattttcgctactacatagcctaacagatagatcatcacttttccggcaacaatcgaccgcatcatggctaactggaatttttaattcatggcaattagcggcaatggaatataaaattcactcgcgtgtgtctcatattgcctgttgtcgccactatttcatcgcgaggaaagatatgaacggcttacttcgtatccgtcagcgttaccaggggcttgcccagagtgataaaaaactggcggattatctgctgctacaacctgatacggcgcgccatttaagctctcagcaactggccaacgaagccggagtcagtcagtccagcgtcgtgaagttcgcgcaaaaactcggctataaaggttttccggcgcttaagttggcgttgagtgaagcgctggcaagccagccggaaagtccctccgtgcccattcataaccaaatccgcggtgatgatccgttacggctggtcggcgaaaaactaattaaagaaaatactgccgctatgtacgcaacgctaaacgttaatagtgaagagaaactgcatgaatgcgtaacaatgttgcgctctgcgcggcggataattctgaccggtattggcgctagcggtctggtggcgcaaaactttgcctggaagctgatgaagattggcttcaatgctgccgcagtgcgcgatatgcatgcgctactcgcaacagtacaggcgagctcccctgacgatctgttattagccatttcctacaccggtgtacgacgcgagttaaacctggcggcagatgagatgctgcgagtgggcggaaaagtgctggcgattaccggctttactccgaatgccctgcaacagcgtgcttctcattgcctgtataccattgccgaagaacaagcgacaaacagtgctagtatctctgcttgtcacgctcagggaatgttaacggatttgctgttcattgcgctgattcagcaggatctggaactggcaccagaacgtattcgtcatagtgaagcgctggtgaaaaaactggtctaagtaaagaatgcgcgtataatgcccgcccggtttgtgttgttttgagagtttccttatggcgttgttaatcactaaaaaatgcatcaattgtgatatgtgtgaacccgaatgcccgaatgaggcgattagtatgggagatcatatctacgagattaacagcgataagtgtaccgaatgcgtagggcactacgagacaccaacctgccagaaggtgtgcccgatccccaatactattgtgaaagatccggcgcatgtcgagacagaagaacagttgtgggataaatttgtgctgatgcaccacgcggataaaatttaatattctactctggaagtagagtattaattatattactgggaagccttaacgccattatatttatttaattgatgacattagcataatcattcactaagttaatttatatagtatctgcccagacacttatttatagttattaaaggtgcgtccgactggttcaccggacgcaccttaagtacgtttccttgtgttataagaacagaaggatcagctgtaaaacagcaatgatgattttgatgacccgtttaatcaggtatcggcaatcagtcattcgtttttccttaaacaaggaatgcagccattcagattagcccttacatctccccaaaactgaacgtgcgagttattgagggtgcatgctgcactccacaccagagctttgacgacaccactcgtttcaatgggggaattctgtggcatggtgtaaagcacagcaaaatcttcaataacgaagccaattttaatgtacttacgaattggcggtcacgttaatctttccatcaatattgctttcttcgtaaaggctcgagtttttatgctaaagattgcaagttgcttgtaaaagataagtacactgatccataatcgctgttgttgagggtgcatgctgcacaaaattaaagttaaaaagtaaaacccccgttccttaccagttcgggggttttactttttaaagagaacggtattatttttaactttcaataattaccgtggcacaagcatagtgccgctcatctgccagcgttacatgcatatttgcaacgcccagcttttccgccagttttaatgcctcgccccatagccgtagccgtggtttgccgagctcatcattgaatacttcaaattgattaaacgccagaccattgcggatcccggtgccaaacgcttttgctgcggcttctttcacagcaaaacgcttcgccagaaaacgcaccggctggtggtgcgttttccagatagcccattcgttatcgcttaatacgcggcgtgccaggcgatcaccggatcgggcgatcaccgcttcgatgcgagcgatctccacaatatccgtgcctaaacctaatattgccattagccacgcgcttccagcatcagacgcttcatttctgccaccgcatctttcagtccggtcatcactgcacgaccaataatggcatgaccgatattcagttcatgcatctcagggatggcggcaatggctttcacgttgtgataggtcagaccgtgtccggcgttaactttcagaccgaggcttgcggcaaaggtcgcggctttggcgatacgcgccagctcttgcgcctgttcggcgtcagttttggcatcagcatagcaaccggtgtggatctcgataaacggtgcgccaacctctgccgcagctttgatctgctcttcatcggcgtcaataaacagagaaacctgaatcccggcatctgccagacgtttgcaggcatcgcgcattttgtcacgctgccctgcgacatccaggccgccttcggttgttacttcctgacgcttttccggtaccaggcagcaaaaatgtggcttcgtctcaacggcgatcgccagcatctcttcggtcaccgccatctccagattcatgcgggtatccagcgtctgacgcaggatgcgcacgtcgcggtcagtaatgtgacggcgatcttcacgtaaatgcacggtaatgccgtccgctcccgcctgctcggcaataaacgcggcctgcaccggatccgggtaagcggtaccgcgcgcgttgcgcagcgtagcgatatggtcaatgttgacgcctaacagtaattcagccatgacaatcctcatcattcataatgtgttttcaccgttcgcttaggcataaactgccggaacagttccctgctctttaaaggtttaccgccaagatacggcttaagcgccatgcgggtaaagcgtttcgcggcgcgcagtgtgtctgcgtcaggaaattcccgtgcgtttaacgcttttaactgccttccggtgaacgttttattgtcgataacgacgcttgcgataaaccctttttcttcgcgataacgatacgtcatggtgtcatctaccggctcgccgctacccgcacaatgggtaaaattgacgccataacccagatgcccgagcagtgccagttcaaagcggcgcagcgcgggttctggcgtaccagtgacccctgcaagagactgaatgcagtgcaagtaatcgaaaaaaagttcagagaagcgcgtctcgtattccagtacgcgggagagaagttcgttgatgtacagaccgctgtaaagcgtgataccgcttaatggcagcgccaggctgacggcttcagcactgcgcagcgttttgacttcgccacgcccgccaaaacgtagcaagagaggggtgaaaggctgtaatgcacctttcagggtagagcgtttagagcgtgcgcctttggcaaccagacgcacgcgcccgctttcctccgtgaagacgtccagcatcaggctggtttcgctccacgggcgactatgcaggacaaatgcgcgctgccagccttccatcggagttactcttaaagatcgtcaacgtaaccgagactgcgcagtgcgcgttcgtcgtcggcccaaccggatttcacttttacccacagttcaaggtgaacaggcgcttcgaacatttcctgcatgtctttacgcgcttcaatcccgatggttttgatcttggcccctttgttgccaatgaccatcttcttctgcccttcacgctcaacgagaatcaaaccgttgatgtcataaccaccgcgttcgttagagacgaaacgttcgatctccacggtcacggagtacggcagttcagcgccgaggaaacgcatcagtttttcgcggatgatttcagacgccataaaacgctgactgcgatcggtgatgtaatcttccgggaagtgatgagtcgcttcaggtagatgcttacgcacgattgccgcaatagtgtcaacattcagcccggtttcggcagagattggcacgatatcgaggaagttcatctggcttgccaggaactgcaggtgcggcagcagatcggctttctcctgcacgttgtccactttgttcaccgcgaggattaccggcgctttgccttcgcgcagtttgttgagcaccatttcgtcgtccggcgtccagcgggtgccttcaacgacaaaaatcaccagctcaacatcgccaatagagctgctcgccgctttgttcatcaggcggttaatggcgcgtttttcttccatatgcaggcccggtgtatcgacgtagatcgcctgatacgcgccttcagtatggatccccacaatgcggtgacgagttgtctgcgccttgcgggaagtgatggagattttctgccccagcagtttgttcaacaatgtggatttgccaacgttcggacgtccgacgatggcaataaatccgcagtaacttttatcgatgctcattccagctccagttttttcaacgcctgttcggcggcagcctgctcagccttacgacggctactacctgtgccaaccaccggttcactcaggccgctgacctggcagtggatagtaaattcctgatcgtgcgcttcgccacgtacctggactaccagataagtcggcagcggcagatggcgaccctgcaaatattcttgcaagcgcgttttcggatctttttgtttatcgcctgggctaatttcgtccaaacgagtttgataccagttgaggattaatttctcgacggtttgaatatcactgtcgaggaatacgccaccaattaatgcttcgacggtgtcggcgagaatactctcacgacgaaatccaccgcttttaagttcacctggccctaaacgtaagcactcgcctaactcaaattcgcgcgccagttccgccagcgtattgccacggaccagcgtggcgcgcatccggctcatatcgccttcatccacacgagggaaacggtgataaagcgcattggcgataacgtagctcagaatagagtcgcctaaaaattctaaacgctcgttatgtttactgctggcactacgatgagttaatgcctgctgcaacagttcctgatgattaaaagtgtagcccagcttccgttgaagccgattaattacgatggggttcatgcgataccaataaataaatgcgtcaacaattcagcacacgaaacagacctgatatacatggttctgctaactgcttcgctgcagtttcagtttaccggtatatggggaccaacgctgtttcgtgtgccgtggcaacctggaggtgccaaccttaaacttcgggggaatattctatacacaacgacgggggatgtcgttagccacgggagatttatctcataaataattcacgttgtcgccataacggcgacaacgtgaacgaagatggctattaatggatgccgccaatgcgacttaagcgcagaccagtcggccattcgccttcttgcttatcgaagctcatccagatagccgttgcccgaccgaccagattcgcttccggcacaaagccccagtaacggctgtccgcgctgttgtcgcggttgtcgcccatcatgaagtattgtcccggaggaacaatccaggttgccagttgttgccctggctgctggtaatacatccccacctgatcctgcgcaatcggcactgtcagaatgcggtgcgtcacatcacccagtgtctctttacgctcggaaagacgaattccattttctttggtttcgtttttcggcacttcaaagaatccgctggtcgcttccccaccattacggcgactgaaggtctgaacgaaatcgctcggttccacgttactgtaggtgaccggcagcgcgttttcacacgcctggccggaactgcatcccggttgaatcgtcagctctttactgaccggatcgtaagtgactttatcgcccggtaaacccaccgcgcgcttgatgtaatcaagctttggatcttccggatatttaaagaccacgatatcgccgcgtttcggatgaccggtttcgatcagcgttttctggtagataggatctttaatgccataagcaaacttctctaccagaataaaatcaccaattaacagagtcggcatcatgctaccactcgggatctggaacggttcataaataaagctacgcacaatcaatacgatagccagtaccggaaaaacagaagcaccggtttccagccagccaggcttcggcgcaacctttttcaacgttgctttatccagactgtccccggcagccgcctgcgccgctgcctgacgttcccgccgtttaggtgcgaaaaagaatttatccacgcaccataaaatgcccgtcaccagtgtggcaatcaccagaatcagggcaaacatattcgccatgccaactcctaagggttatttgttgtctttgccgacgtgcagaatggcgaggaacgcttcctgcggcagctcgacgttaccgatctgcttcatgcgtttcttaccttctttctgcttctgcagcagctttttcttacggctgatatcgccgccataacatttagccagtacgtttttacgcagctgtttcacggtggatcgcgcaatgatgtgcgtaccaatcgctgcctgaatggcgatatcaaactgctggcgtgggatcagatctttcatcttctccaccaactcgcgaccgcggttttggctattatcacggtgggtgatcaacgccagcgcatcaacacgttcaccgttgattaatacgtctacacgtaccatgtcggacgcctggaagcgcttgaagttgtaatccagagacgcataaccacggctggtagatttcaggcgatcgaagaagtcgagcaccacttccgccatcgggatctcgtacgtcagcgccacctgattaccgtggtaaaccatattggtctgcacgccgcgtttttctacgcacaacgtaataacgttgccgagatatgcctgcggcagcagcatgtgacactctgcaatcggctcgcgcagttcgtagatgttatttaccgcaggcagcttggatgggctgtcgacgtagataacttctctactcgtggtttcaacttcatacactacggtcggcgcagtggtgatcagatccagatcgtattcacgttccagacgttcctggatgatctccatgtgcagcaggccgaggaagccgcagcggaaaccaaagcccagcgcgctggagctttccggctcatagaacagactggcatcgttcaggctgagtttacccagcgcgtcacggaaggcttcatagtcgtcggaacttaccgggaacagaccggcgtatacctgcggtttgactttcttaaagccaggcagcgccttttctgccggattacgcgccagcgttaaggtatcgccgactggagcgccgtggatatctttaatcgcacatacgagccagcctacttcgccacatttcagttcagtgcggtcaacctgtttcggcgtgaagatgcccagacggtcggcgttataggtctgcccggtactcatgactttcactttgtcgcccttacgcagggtgccgtttttaatacggataagactaacaacgcccaggtagttgtcgaaccaactgtcgataattagtgcctgcaacgggccttccggatcgccttccggcggcggaatgtcgcgcaccagacgttcgagaacgtcctgcacaccaacgccggttttcgcactacagcgcaccgcgtcggtggcgtcgatgccgacgatatcttcaatttcttccgccacgcgttcaggatcggctgccggcaggtcaatcttgttcagtaccggcacaacttcgagatccatttccatggcggtgtagcagtttgccagggtttgcgcttctacgccctgcccggcgtcgaccaccagcaatgcaccttcacaggcagccaggctacgggaaacttcataggagaagtctacgtggcccggggtgtcgataaagttaagctgataggtttcgccgtcagacgctttgtagtccagcgtcacgctttgcgctttgatggtaatgccacgctcacgctcaagatccatggaatcgagaacctgcgcctccatttcacggtcagacaggccaccgcagatctggataatacggtcagacagcgtgcttttaccgtggtcaatgtgagctatgatgctaaagttacgtatattcttcataaagtatgattattgtgccttaatgcccggttaaccaggcttttagaagtcgctgttctgagcttaacgtctgtattaatagaaacgccgcattctacactacaacattgaggcgaggaaatgttcataccgtatggattgtggtatctggaaacgtcctcgcatttgttatgcaaaatgcaacaaagccagtgaaatcactggctcgcgtcttcgctagatgtttcaaatcgcacaaggccaggcggcaatgccacgcttaagatgatcggttgccattctgcccgggcagcaaacttacggctgtagccgcgcgcaatcaggaacccgccaataccaccgaggatcgcaccacataatgctgcgacgtcagaagcaaagagtagctgaaataggctagcgataaggaataatcccaccagcgggctcatataaaccagtaatgcggagctaagcaggctgccttcggcgatccccaattccactttttgccccggcactaacggctcatcacagggtacgacaatggtatgcgtggtttgcgggccaagtttatttaacacgcggctaccgcaaccggcgcgactagcgcagctgctgcaactagctttaacatcacaactgaccagcgcctgcccgttttgccaggagacgacggtagcccactctttgatcattgcgctgccccgaacttaatattctcggcaatgcgtttcgccgtttgcggcggcagttcaccgacaatggtgatttcggcgttatcacgtacgcttgtactgacggttctgcgtccggtgcgcaacatctgatcggtgctgcttggcgtagcgcggttaacgtttacgctgaagctgaataatccgtcggaatagagacgactttcgataggcatgttgtccatcgtcggtagcggacgtcgactactggaaacttcgctaaaaccctgtggcaaccaggttggcgtccagctgaatttagctttttcacctacaggaacagaaagcaacggcggcaaatttgccttcgccagcgtctgcatactgctgctgatatcctgattgacgttaaaagcaatcacgcgaaattgttccagcgtttcaccatcgcgatcaaggagatcaacccgcatcggtaatttgctttcggtgtccatccacacgatgtagctgtagcgtgtaccatctcgggcaaccacgcgaatgacttcgcaaagacgatcagcaatacgcgtgcgcccgacggagataaagtcgtagtaaggagaaaggcgtttgaaatcggtatagataaggcttggcagagaatcaacaatgtaatcgccattaagcgtgaacggttcaagtcccggttcaaaatagctgatttcattgccgcgctgtaccacttcccggcgcgggccatccatttgcaacaattgtgcaagaggacggttatcgaggcgtgcatgtcgataacgcagagactcaacaccctgtttattgatgctgatgaaactcagctcgtaattcagactctgactggccaggttcatctgctgtaataacgccccggacgcgggagtggcgctggcgttagcagagaataacaggctacctgtcactaaactcatggcaaaccaaagttgcttcattactggctttgcgttcctaaagtttgaattcctggcacctgtacagcggcttgctgggtttgcgcctgctcaaactgaagctgttcagagtggagtcggcgttgcagttcgtaatcctgcaacattgcattaatgcgacgacgctgctcctgtacctgctgctgttgaccattgtttgcggtcgcttcagaaggtactcccaggcttaccgggctggctttacccatcatcggcagtgtattaaataccggcgtttcgggctgctgggacgtttcagattgtccattatagtgctggacgccaacgataactgcaaggcttacgcatgcggctacgcccatttgggtaagctgtgccgcccacggacgtactttctgccagaatggcattttctgccattgatgcggcgcaggctgggcttccgggatcaatgtcgccggttgacgtactggctcttcttcaatggcggccatcacgcgactagagatatcgaaatggagcacctcgggagtatcaccccgcatactgtcacggattaagtgatagctttcccaggttttctgcatttctgggttatgagccagttcgttaagcagctcactatccagcgtttcgccatccattaaagcggaaagttgttctttctgcatgcctaatacccttatccagtatcccgctatcgtcaacgcctgataagcggttgaactttgttatcaatagcttccctcgctcggaagatacgactacgcaccgtacctaccggacaatccatgatagcggctatctcttcatagctcaggccatccagctcccgcaaggttattgccatgcgtaaatcttccgggagggactcaatagttcggaaaactatctgtctcagttcttcactcaacattaagttctcagggttgctaatttctttcaacgcgccgccactttcgaagttttcagcttcaatggcatccacatcactggaaggtggacgacgcccctgagcaaccaggtaatttttcgctgtatttacagcaatccgatacagccatgtataaaaagcgctatctccccggaagctatccagcgcacgataggctttaataaaagcttcttgtaccacatcgggaacatcaccgctcggcacatagcgggaaaccagactcgccactttatgctgatagcgcactaccagtaagttaaaggctttctgatctcccttctggacccgttcaaccaggacctggtccgttaactgctcgctcatccgaggtaaagtctccccaaaccaaatttccacgcgctatcgaaacgccactccattagctgcaatttgagcaagcaaagggttagagtgtctcgtttttgtaaagttccgtaacgcatctgtttttgtttgtcatgctgtagacggatcattatctatcattataagtctacagaatctgaacatcgcattatctgtgtagaaatgcccatttaactgcctgaagagtaacccaacggcctttttatttcaccacctaatcctccaccagccagtaacttctctttttctcgccgccctgcgtcagcgtgtttagcaactgtaacaaatattaaaatagcaggtgtttatccgcacaacatgatgctatgctgaccaaaccatgtttagtaaattaaacaaagaaaatgaatactctccctgaacatagttgtgacgtgttgattatcggtagcggcgcagccggacttagtctggcgctacgcctggctgaccagcatcaggtcatcgttctaagtaaaggcccggtaacggaaggtagtacattttatgcccagggcggtattgccgccgtgtttgatgaaactgacagcattgacagccatgtggaagacacattgattgccggggctggtatttgcgatcgccatgcagttgaatttgtcgccagcaatgcacgatcctgtgtgcaatggctaatcgaccagggggtgttgtttgatacccacattcaaccgaatggcgaagaaagttaccatctgacccgtgaaggtggacatagtcaccgtcgtattcttcatgccgccgacgccaccggtagagaagtagaaaccacgctggtgagcaaggcgctgaaccatccgaatattcgcgtgctggagcgcagcaacgcggttgatctgattgtttctgacaaaattggcctgccgggcacgcgacgggttgttggcgcgtgggtatggaaccgtaataaagaaacggtggaaacctgccacgcaaaagcggtggtgctggcaaccggcggtgcgagcaaggtttatcagtacaccaccaatccggatatttcttctggcgatggcattgctatggcgtggcgcgcaggctgccgggttgccaatctcgaatttaatcagttccaccctaccgcgctatatcacccacaggcacgcaatttcctgttaacagaagcactgcgcggcgaaggcgcttatctcaagcgcccggatggtacgcgttttatgcccgattttgatgagcgcggcgaactggccccgcgcgatattgtcgcccgcgccattgaccatgaaatgaaacgcctcggcgcagattgtatgttccttgatatcagccataagcccgccgattttattcgccagcatttcccgatgatttatgaaaagctgctcgggctggggattgatctcacacaagaaccggtaccgattgtgcctgctgcacattatacctgcggtggtgtaatggttgatgatcatgggcgtacggacgtcgagggcttgtatgccattggcgaggtgagttataccggcttacacggcgctaaccgcatggccagcaatagtttgctggagtgtctggtctatggctggagcgcggcggaagatatcaccagacgtatgccttatgcccacgacatcagtacgttaccgccgtgggatgaaagccgcgttgagaaccctgacgaacgggtagtaattcagcataactggcacgagctacgtctgtttatgtgggattacgttggcattgtgcgcacaacgaagcgcctggaacgcgccctgcggcggataaccatgctccaacaagaaatagacgaatattacgcccatttccgcgtcagtaataatttgctggagctgcgtaatctggtacaggttgccgagttgattgttcgctgtgcaatgatgcgtaaagagagtcgggggttgcatttcacgctggattatccggaactgctcacccattccggtccgagcatcctttcccccggcaatcattacataaacagataaaaagcctgggtcagcgccgtatacgcttcggaatagttctggtctggcccacgaatgactaagcgatcgctaaagcattctcccgcctgcggggagaatgccagcagcacccgatgcggcagtcgcgcttcgttttccgccacatccgtccgcaaacgtaaatgccagcccatgcttaatgccagctccgtaaaaccattaccaatctgctctggcagcactacgcagaaaaatccctcttcggtaatgcactccgccgcacaggtcagcaagcttgggtgatcaagcgtagtggtatagcgagcctgttcccgttgaggtgtgctgcactctactccctgctgatagtaaggtgggttactgatgattaaatcgaagcgtactgtctgctgtgtaatccactgctgaatatccgccgtatggacgttaatccgctctgcccacggggactggttgatattttcctgcgcctgcgcggcagcttcactttccagttcaactgcatcaatcatcacgctgtcatcggttcgctgcgccagcattaatgccagcaacccgctacccgcgccgatatcaaggcaacgttttaccccagccaccggtgcccatgcgcccaataaaataccatccgttcccactttcatcgcacagcgatcgtgagcaacaaaaaactgtttaaaagtaaatccattacgacgaagcacggatgtagactgactcatgaaaataaaaccttgcaggaaaaacggcgatagcaccgggtgagaacaatacccgagaagcgatatccatacaaacagatgaagattgcagccgtaacgtctataatcagcgccccacacagaggtagaacatgactgtaacgactttttccgaacttgaactcgacgaaagcctgctggaagccctccaggataaaggtttcactcgcccgaccgccattcaggctgccgccattccgcctgcgctcgatggccgtgatgtactcggttctgcgccgacaggcaccggtaaaacggcggcgtatctgctgccagcgttgcagcacctgctcgatttcccgcgtaagaaatccggtccgccgcgtattttgatcctcaccccaactcgcgagctggcgatgcaggtgtccgatcatgcccgcgaactggcgaaacatacgcatctggatatcgccaccatcaccggcggcgtagcctatatgaaccacgcggaagtgttcagcgaaaatcaggacatcgtggtcgccacgaccggacgtctgctgcaatacataaaagaagagaacttcgattgccgcgcggttgaaacgctgatcctcgacgaagcagaccgtatgctggatatgggcttcgctcaggatatcgaacatattgctggcgaaacgcgctggcgtaaacagaccctgctctttagcgcaacgctggaaggcgatgcgattcaggactttgccgagcgtctgctggaagatccggtggaagtttctgccaatccctccacccgtgagcgcaaaaaaattcatcagtggtattaccgcgccgatgatcttgagcataaaaccgcgttgctggtgcatctgttaaaacagccggaagcgacccgcagtattgtgtttgtgcgtaagcgtgagcgtgtgcatgagctggcaaactggctgcgcgaagcgggcatcaacaactgctatctcgaaggtgagatggtacagggcaagcgtaacgaagcgatcaagcgtttgaccgaaggtcgcgtaaacgtactggtcgcaaccgatgttgccgcgcgcggtatcgacattcctgacgtcagccacgtctttaacttcgatatgccgcgcagtggcgatacttatttgcaccgtatcggacgtaccgcgcgcgccggtcgtaaaggcaccgcaattagcctggtggaagcccatgaccatctgctgctgggtaaagtaggccgctatattgaagagccaattaaagctcgcgttattgatgagttacgcccgaaaacgcgtgcgccaagcgaaaagcagaccggcaagccaagcaagaaagtactggctaaacgtgctgagaagaaaaaagctaaagagaaagagaagccgcgggtgaaaaaacgccatcgcgacaccaaaaatattggtaagcgccgtaaaccaagcggaacgggcgtgccaccgcaaacgacagaagagtaatctcaatgccaggtttaagcctggtattaaaagtgctggcaaacgcaaaactgcctgatgcgctacgcttatcaggcctacgtggctcatgcaatatattgaatttgcacgatcttgtaggccggataaggcgttcacgccgcatccggcatgaataaagcgcactttgtcgacaagttaaatgccgggtttaatcccgacattatttttatccagccacaaaactctcttcaacacactgaataaaagtgtgcatcgccgggctaaccgcttttccagcatgatgtgcgcacatggccgtaatggtctggctctgttcgccaaaaggcaattcaattaattctccgcactccaactcttttgccaccgcaaagcgcggtaggtagctgaccccgatattcgccgcgacacaacgcttgatgctttcgatacttataagctcaatggtgttttccaccgtgatccgccgctgacgcagcgtgctctcaaatatctgccggaagacacattgcggttcgttgataataaagctacaggcgttatgtcttcccggctcagtaaaatcgacatctgcaatttgcggactagccaccagcaccagactttgttcacccaactctcgtcgattcagagcatcatcattccctacacgataaaagacgccaacatcggcctcatcattcagtagcgcatcacggatcacgtaacagttcaggctctgcaagcttaaacgcacttttggggcgcgttgccgaaaacgctgcaacacctgcggcattcggtaagagagcaacgtttcgccgctaacaacgcgtagttccccgtccggatcactctcctttttggcagcctcacgaagcgtatccatcactcgggtaagttcataaatgtgcggcagcaacttttttccttcgcgggtaaggcacatccgtcggccaattttctcaaataactggacactaaactcctgctcaagctgctgaatatgaaaagtcaccgtgctttgtgtacagcacaatttttggctagctcgcaaaaaggaaccctcttccaccacggttttaagcgtaataaaacggcgcagatccataaccccaaacctatcgaaaatatcgaatctagaatataaaaacattcatttttttaaatgttccgtgtcgggtactgtctaccaaaacagaggagataacaagtgacaccgacccttttaagtgctttttggacttacaccctgattaccgctatgacgccaggaccgaacaatattctcgcccttagctctgctacgagccatggatttcgtcaaagtacccgcgtgctggcagggatgagtctgggatttttgattgtgatgttactgtgtgcgggcattagttttagtctggcagtgattgacccggcagcggtacaccttttgagttgggcgggggcggcatatattgtctggctggcgtggaaaatcgccaccagcccaacaaaggaagacggacttcaggcaaaaccaatcagcttttgggccagctttgctttgcagtttgtgaacgtcaaatcattttgtacggtgttacggcactgagcacgtttgttctgccgcaaacacaggcgttaagctgggtagttggcgtcagcgttttgctggcgatgattgggacgtttggcaatgtgtgctgggcgctggcggggcatctgtttcagcgattgtttcgccagtatggtcgccagttaaatatcgtgcttgccctgttgctggtctattgcgcggtacgcattttctattaacgaaaaaaagcggaagaggtcgccctcttccgcttagtaacttgctacttaagccttacaggctttcagtaaaggtacgagcgataacgtcgcgctgctgttccggagtcagagagttaaagcgaactgcataaccggatacacggatggtcagctgcggatatttttccggatgcttaactgcatcttccagagtttcgcgacgcagaacgttaacgttcaggtgttgaccaccttcaacgcgaacttctggtttcacttctactggaacttcacggtattcaatgtcacccagtttgcttactgcaaccacttcatcttctgcataacctgcttttgcaacgatgcaacgcgcttcgcctttttcgctgtccagcagccagaaagagttcagcagatcgtcgttagcggctttagtaatctggatacctgtaatcatgtgatgcctccccggcaaaattatttgatttgttcagcctgtcgcggccaattggtaaaaccattgttgcttgagtgtatatatactcctcaaacacccttgaatctttgatttaaatcaataaaaaccacacatcaagtatggtcgcaaatggattttattgttttacatcaacttatgcgggtgtgaaattttaccaatttacatttttttgcactcgtttaagtctaaaaaatgagcatgattttgttctgtagaaagaagcagttaagctaggcggattgaagattcgcaggagagcgagatggctaacgaattaacctggcatgacgtgctggctgaagagaagcagcaaccctattttcttaatacccttcagaccgtcgccagcgagcggcagtccggcgtcactatctacccaccacaaaaagatgtctttaacgcgttccgctttacagagttgggtgacgttaaagtggtgattctcggccaggatccttatcacggaccgggacaggcgcatggtctggcattttccgttcgtcccggcattgccattcctccgagtttattgaatatgtataaagagctggaaaatactattccgggcttcacccgccctaatcatggttatcttgaaagctgggcgcgtcagggcgttctgctactcaatactgtgttgacggtacgcgcaggtcaggcgcattcccacgccagcctcggctgggaaaccttcaccgataaagtgatcagcctgattaaccagcatcgcgaaggcgtggtgtttttgttgtggggaagccatgcgcaaaagaaaggggcgattatagataagcaacgccatcatgtactgaaagcaccgcatccgagcccgcttagcgcgcatcgtggattctttggctgcaaccattttgtgctggcaaatcagtggctggaacaacgtggcgagacgccgattgactggatgccagtattaccggcagagagtgagtaaatttgcggggaaatgccggatggcagagttgccacccggctgatttatcaggctttattctgacgccaccattcaccaagcaaaacgccggttgcgacagagatattcagcccggcaacgttgcccgtaccgtcaatcttcacgcgcagatcgttcggatcgcgtgcggcatccggtaacccttcatattcctgacccagcaccagtaccattttcgctggcagactagttttgaacagcggtttaccctgctcgctggaagtggtcactacggtgtaacctgcctgacggaaatcatccagcacgttaacaatgttgtcgccagtaatcggctgaacgtgctctgcgccgccttctgcggtacggatagccgccccgctctccagcagtgccgcatcctgcaccacgacacctttcacgccgaagtgcgcgcagctgcgcatcatgccacccaggttatgcgggttagattcgttttccagtgccagaacgcaatcctgcgcgcctgcctggcttacccactgctgcacggttgtaccgttacgctttttgatcaagaagcaaacgccgccgtgatgttccgtgccactcgcttttgtcaattccgcttcatccaccacatggtacgctttgcggtttgctgccatccagcgcaaagcttctttaaaacgcggcgttacactctggataaaccaggcgcgaacaatcgcttccggacggctctggaaaagtgcctgacatgcattttcgccgtagacgcgggtttcttccgcacgctgacgacgcaacacttccggatcaataaaacttttaccactgatgccaccgtgatcggccttttccggcgtctcatcacccggcgcgcgggaaaccgtgcgccacgggctatcttcccacttgcggtcacggggctgactctgtttgtcatcgcgggcggggcgacggccaccgtcagcacgagattttcctggacgcccgccccctttcccggtacgcgggttgtgggtacgtttatcagaatcatcatcactgcggacatacatcactttgaccttgccgcttttacctttcatttcatcgttcatgcttttctccaccagcgctgcgcgaagcgcgcagattacccgaagtccgcgcggttcgccatgatttcgtaccaaagcctgcgactatcatacctattgaataaaacagattgttgtctggaacaatgtccccgataatatgtaacatattagaaacataccggcgtcgttgccgataagtctccttactcatcccgaggttagttatgaataccgtttgtacccattgtcaggccatcaatcgcattcccgacgatcggatcgaagatgcggcaaaatgcggacgctgcggtcacgacttgtttgacggagaggtgattaatgcgaccggtgaaacactcgacaaattgctgaaggatgatctacctgtggtgatcgacttctgggcaccgtggtgcggcccctgccgtaatttcgcaccaatttttgaagatgtcgcgcaagagcgtagcggtaaagtgcgctttgtgaaagtgaataccgaagctgaacgtgaattgagcagtcgctttggaattcgtagtataccgacgatcatgattttcaaaaacggtcaggttgtcgacatgcttaatggcgcagtaccgaaagcgccgttcgatagctggctgaacgaatctctttaatcttaccggggcgcatcttgtgccccgttttctcctctgcgacaatggcgttttttcgacgctctcttatgaccgaaaacgctgttctccagttacgcgccgagcgtattgcgcgcgcaacacgtccttttcttgcccgcggtaatcgcgttcgtcgctgccaacgctgtcttttgccagagaaattatgtctctgtagcacaattaccccagcacaagcaaaaagtcgcttctgtttgctgatgttcgacaccgagccaatgaagcccagtaataccgggcgtctcattgctgatattttgcctgataccgttgcgtttcaatggagccgtaccgaacccagccaggatttgctggagttggtgcaaaacccggactatcagccaatggtggtctttcccgctagctatgctgatgagcaacgggaagtgatcttcacaccacctgccggtaagccaccgctgtttatcatgctcgatggtacctggccggaagctcgcaagatgtttcgtaaaagtccgtatctggataatcttcccgtcatttccgtcgatctttcccggctttctgcctatcgcctgcgtgaagcccaggctgaaggccaatattgtactgccgaggtagccatcgcactgttagatatggccggcgataccggggcggcggcagggttaggcgagcattttacccgctttaaaacacgctatctggcaggaaaaacgcaacatctgggtagcatcacagcagaacagttagaaagcgtttaaaatcattcggtcacttctgcgggagaccggtatgagtcagcgaggactggaagcactactgcgaccaaaaagcatagcggtaattggcgcgagcatgaaacccaatcgcgcaggttacctgatgatgcgtaacctgctggcgggaggctttaacggaccggtactcccggtgacgccagcctggaaagcggtgttgggtgtgttggcctggccggatattgccagcttgccctttacacccgaccttgcggttttatgtaccaatgccagccgtaatcttgctcttctggaagagctcggcgagaaaggctgtaaaacctgcattattctttccgccccggcaagccaacacgaagatctccgcgcctgcgccctgcgccataacatgcgcctgcttggaccaaacagtctgggtttactggctccctggcaaggtctgaatgccagctttagccctgtgccgattaaacgcggcaagctggcgtttattagccaaagcgctgccgtctccaacaccatcctcgactgggcgcaacagcgtaagatgggcttttcctactttattgcgctcggcgacagcctggatatcgacgttgatgaattgcttgactatctggcacgcgacagtaaaaccagcgccatcctgctctatctcgaacagttaagcgacgcgcgacgctttgttagcgcggcccgtagtgccagccgtaataaaccgattctggtgattaaaagcggacgtagcccggcggcacagcgactgctcaacacgacggcaggaatggacccggcatgggatgcggctattcagcgtgccggtttgttgcgggtacaggacacccacgagctgtttagcgcggtggaaacccttagccatatgcgcccgctacgtggcgaccggctgatgattatcagcaacggtgctgcgcctgccgcgctggcgctggatgccttatggagtcgcaatggcaagctggcaacgctaagcgaagaaacctgccagaaactgcgcgatgcactgccagaacatgtggcaatatctaacccgctcgatctacgcgatgacgccagcagtgagcactatattaaaacgctggatattctgctccacagccaggattttgacgcgctgatggttattcatagccccagcgccgctgctcccgcaacagaaagcgcgcaagtattaattgaagcggtaaagcatcatccccgcagcaaatatgtctctttgctgacgaactggtgcggcgagcactccagccaagaggcacgacgtttattcagcgaagccgggctgccgacctaccgtaccccggaaggaaccatcactgcttttatgcatatggtggagtaccggcgtaatcagaagcaactacgcgaaacgccggcgttgcccagcaatctgacttccaataccgcagaagcgcatcttctgttgcaacaggcgattgccgaaggggctacgagcctcgatacccatgaagttcagcccatcctgcaagcgtatggcatgaacacgctccctacctggattgccagcgatagcaccgaagcggtgcatattgccgaacagattggttatccggtggcgctgaaattgcgtagcccggatattccacataaaagcgaagttcagggcgtcatgctttacctgcgtacagccaatgaagtccagcaagcggcgaacgctattttcgatcgcgtaaaaatggcctggccacaggcgcgggtccacggcctgttggtgcaaagtatggctaaccgtgctggcgctcaggagttgcgggttgtggttgagcacgatccggttttcgggccgttgatcatgctgggtgaaggcggtgtggagtggcgtcctgaagatcaagccgtcgtcgcactgccgccgctgaacatgaacctggcccgctatctggttattcaggggatcaaaagtaaaaagattcgtgcgcgcagtgcgctacgcccattggatgttgcaggcttgagccagcttctggtgcaggtttccaacttgattgtcgattgcccggaaattcagcgtctggatattcatcctttgctggcttctggcagtgaatttaccgcgctggatgtcacgctggatatcagcccgtttgaaggcgataacgagagtcggctggcagtgcgcccttatccgcatcagctggaagaatgggtagaattgaaaaacggtgaacgctgcttgttccgcccgattttgccagaagatgagccacaacttcagcaattcattagccgagtcaccaaagaagatctttattaccgctactttagcgagatcaacgaatttacccatgaagatttagccaacatgacacagatcgactacgatcgggaaatggcgtttgtagcggtacgacgtattgatcaaacggaagagatcctcggcgtcacgcgtgcgatttccgatcctgataacatcgatgccgaatttgctgtactggttcgcagcgatctcaaagggttaggcttaggtcgacgcttaatggaaaagttgattacctatacgcgagatcacggactacaacgtctgaatggtattacgatgccaaacaatcgtggcatggtggcgctagcccgcaagctcgggtttaacgttgatatccagctcgaagaggggatcgttgggcttacgctaaatcttgcccagcgcgaggaaagttgagtaaggtactggaaatgttgaccacttaatcgggactggtgttattattgcccgcttatgtcgtctgcattgcacagaggacccttcaatgaacagagaagaaatgcactgtgatgttgagtaaatttaagcgtaataaacatcaacaacaccttgcccaactacccaagatttctcaaagtgttgatgatgtcgatttcttttacgctcccgccgacttccgggagacgctgctggaaaaaatagccagcgcgaagcagcgcatttgcattgtcgccctgtatctcgaacaggatgacggtggcaaaggcattctgaacgcgttgtatgaggctaaaaggcagcgtccggaactggatgtgcgggtgctggtcgactggcatcgtgcacaacgtggacgcattggcgctgcggcatctaacactaacgctgactggtactgccgcatggcgcaggaaaatccgggcgtagatgttccggtttatggcgttccaatcaatactcgtgaagcccttggtgttctgcactttaaaggctttatcatcgacgatagcgtactttatagcggtgccagcctgaacgatgtttacctgcatcagcacgataaatatcgctacgaccgttatcatctgatccgtaaccgtaagatgagtgacattatgtttgaatgggttacacagaatattatgaatggccgcggcgttaatcgtctggatgatgttaatcggccaaaaagcccggaaatcaagaacgatattcgtctgttccgccaggagctgcgtgatgccgcttatcatttccagggcgatgccgacaacgatcagctttctgtaacgccgctagtggggctggggaaaagcagtctgttgaacaagaccattttccatcttatgccttgtgccgagcagaaactaaccatctgtacgccatacttcaacctgccagcaatccttgtgcgcaatattatccagttgctgcgcgaagggaaaaaggtcgaaattattgttggtgataaaaccgcgaatgacttctacattccggaagatgaacctttcaagataattggcgcattgccttatctctatgagatcaatctgcgtcgtttcctgagccgtttgcagtattacgtcaatactgaccagctagtggttcggttatggaaagatgacgacaacacctatcacctgaaagggatgtgggttgatgataagtggatgttgatcaccggtaataacctgaacccgcgcgcctggcgtctggatctggaaaacgccattttgatccacgatccgcaacttgagctggcgccacagcgagagaaagaactggagctgatccgcgagcataccaccatcgttaagcactatcgcgatctgcaaagtattgccgattatccggtgaaggttcgtaaactcatccgccgtttgcgccgtatccgcatcgaccgattaattagccgcatcctgtaatcacaaccccgtcctgtacggggtttgttttttggaggccacgttttgcgtattctttttgtctgttcgctattgttactttctggatgcagccatatggctaacgatagctggagcgggcaggataaagctcaacactttatcgccagcgcgatgctttccgccgccggaaatgaatatagtcagcatcaggggatgagccgggatcgcagtgccatgtttggattgatgttctctgtcagtttgggggcgagtaaagagctttgggatagccgccccgaagggagcggctggagctggaaggatttggcctgggatgtcgccggtgcaagcaccggctataccgtctggcaactgacccgtcattaaagacgcatccccttccctttgcgatgtagcatcaaagaaaccagaaacgccaccacggccatcaaggtcacataccagaagaaggctgtttccattcctatacttttcaggctcaacgctacgtactccgcgctaccaccaaatatagcattagcgaccgcataactcagaccaacgcctaatgcgcgaacctgtgccgggaacatctcagccttcagtattccactgatacttgtataaaaactcactatcagcagggcacacatcaccagaccaaaagcggcataagggctggaaacgttttgcaatgcactgagaataggaacggtaaaaatggctgccaggctaccgaaacataacatactggtacggcgaccaatcttatcgctcagcgcgccaatgagtggttgaataagcatgaatacaaacaatgcggcagtcataatgccactcgccacgttggcatgcattcccgcagtatttaccagatacttctgcatataagtagtgaaggtatagaaacaaagggagcccgcagcggtaaaaccgagaaccatgatgaatgcacggcgattgcgccataatcctttcagagatccagcttcttttaaagcgcgcgtttcttgttggctagtttcatctaactgacgacgtaaccacaacgccacaacagctaacacagctcctaacgcgaaaggaatacgccatccccactctctgagtgcagcgtcttccatggtgtgttgtaaaaccacgacaaccagtagggctagcagttgtccgccgatcaacgtcacatactgaaaacttgcgtaaaaacctttgcgcccttcaacggcaacttcactcatataggtggcgctggtgccatattctccgccaacagataatccctgaaataaacgagcgagaagcaataatgccggagcccacgtacctatagtttcataacctgggaggcaggcgataaccaggcttccgaaacacatcatacacacgcttaacagcatgctttttttgcgaccatgtttatcggctatgcggccaaatagccaaccgcctattgggcgcatcaggaatcccgcagcaaaaacacctgctgtttgtagtagttgagtcgtcgtgttcccggaagggaagaagatgtgggcaaagtagagactacagaagctgtagacatagaaatcgaaccactcgaccagattaccactagaggcccccacaatcgcccaaatgcggcgacgagtatcactacttgtcagtttgctgtctgccgttacagtactttcagccatgccattatgtctcctgccgtaatccgatgcttttgtcggtcgcttttgtttattttttttgtaaaggaaatattatacatttgttgcatatcattatgcaaccttaaccatgaatttagttagcaggaaaatggttattgaggagcttaaggataaatttctggtaaggaggacacgtatggaagtgggcaagttggggaagccgtatccgttgctgaatctggcatatgtgggagtataagacgcgcagcgtcgcatcaggcatttttttctgcgccaatgcaaaaaggccatccgtcaggatggcctttcgcataatttgatgcctggcagttccctactctcgcatggggagaccccacactaccatcggcgctacggcgtttcacttctgagttcggcatggggtcaggtgggaccaccgcgctacggccgccaggcaaattctgttttatcagaccgcttctgcgttctgatttaatctgtatcaggctgaaaatcttctctcatccgccaaaacagcttcggcgttgtaaggttaagcctcacggttcattagtaccggttagctcaacgcatcgctgcgcttacacacccggcctatcaacgtcgtcgtcttcaacgttccttcaggacccttaaagggtcagggagaactcatctcggggcaagtttcgtgcttagatgctttcagcacttatctcttccgcatttagctaccgggcagtgccattggcatgacaacccgaacaccagtgatgcgtccactccggtcctctcgtactaggagcagcccccctcagttctccagcgcccacggcagatagggaccgaactgtctcacgacgttctaaacccagctcgcgtaccactttaaatggcgaacagccatacccttgggacctacttcagccccaggatgtgatgagccgacatcgaggtgccaaacaccgccgtcgatatgaactcttgggcggtatcagcctgttatccccggagtaccttttatccgttgagcgatggcccttccattcagaaccaccggatcactatgacctgctttcgcacctgctcgcgccgtcacgctcgcagtcaagctggcttatgccattgcactaacctcctgatgtccgaccaggattagccaaccttcgtgctcctccgttactctttaggaggagaccgccccagtcaaactacccaccagacactgtccgcaacccggattacgggtcaacgttagaacatcaaacattaaagggtggtatttcaaggtcggctccatgcagactggcgtccacacttcaaagcctcccacctatcctacacatcaaggctcaatgttcagtgtcaagctatagtaaaggttcacggggtctttccgtcttgccgcgggtacactgcatcttcacagcgagttcaatttcactgagtctcgggtggagacagcctggccatcattacgccattcgtgcaggtcggaacttacccgacaaggaatttcgctaccttaggaccgttatagttacggccgccgtttaccggggcttcgatcaagagcttcgcttgcgctaaccccatcaattaaccttccggcaccgggcaggcgtcacaccgtatacgtccactttcgtgtttgcacagtgctgtgtttttaataaacagttgcagccagctggtatcttcgactgatttcagctccatccgcgagggacctcacctacatatcagcgtgccttctcccgaagttacggcaccattttgcctagttccttcacccgagttctctcaagcgccttggtattctctacctgaccacctgtgtcggtttggggtacgatttgatgttacctgatgcttagaggcttttcctggaagcagggcatttgttgcttcagcaccgtagtgcctcgtcatcacgcctcagccttgattttccggatttgcctggaaaaccagcctacacgcttaaaccgggacaaccgtcgcccggccaacatagccttctccgtccccccttcgcagtaacaccaagtacaggaatattaacctgtttcccatcgactacgcctttcggcctcgccttaggggtcgactcaccctgccccgattaacgttggacaggaacccttggtcttccggcgagcgggcttttcacccgctttatcgttacttatgtcagcattcgcacttctgatacctccagcatgcctcacagcacaccttcgcaggcttacagaacgctcccctacccaacaacgcataagcgtcgctgccgcagcttcggtgcatggtttagccccgttacatcttccgcgcaggccgactcgaccagtgagctattacgctttctttaaatgatggctgcttctaagccaacatcctggctgtctgggccttcccacatcgtttcccacttaaccatgactttgggaccttagctggcggtctgggttgtttccctcttcacgacggacgttagcacccgccgtgtgtctcccgtgataacattctccggtattcgcagtttgcatcgggttggtaagtcgggatgacccccttgccgaaacagtgctctacccccggagatgaattcacgaggcgctacctaaatagctttcggggagaaccagctatctcccggtttgattggcctttcacccccagccacaagtcatccgctaatttttcaacattagtcggttcggtcctccagttagtgttacccaaccttcaacctgcccatggctagatcaccgggtttcgggtctataccctgcaacttaacgcccagttaagactcggtttcccttcggctcccctattcggttaaccttgctacagaatataagtcgctgacccattatacaaaaggtacgcagtcacacgcctaagcgtgctcccactgcttgtacgtacacggtttcaggttctttttcactcccctcgccggggttcttttcgcctttccctcacggtactggttcactatcggtcagtcaggagtatttagccttggaggatggtccccccatattcagacaggataccacgtgtcccgccctactcatcgagctcacagcatgtgcatttttgtgtacggggctgtcaccctgtatcgcgcgcctttccagacgcttccactaacacacacactgattcaggctctgggctgctccccgttcgctcgccgctactgggggaatctcggttgatttcttttcctcggggtacttagatgtttcagttcccccggttcgcctcattaacctatggattcagttaatgatagtgtgtcgaaacacactgggtttccccattcggaaatcgccggttataacggttcatatcaccttaccgacgcttatcgcagattagcacgtccttcatcgcctctgactgccagggcatccaccgtgtacgcttagtcgcttaacctcacaacccgaagatgtttcacttcagagttgcgaaaatttgagagactcacgaacaactttcattgttcagtgtttcaattttcagcttgatccagatttttaaagagcaaatatatcaaacaagacttaacagtctgttttgagatattgaggtcggcgactttcactcacaaaccagcaagtggcgtcccctaggggattcgaacccctgttaccgccgtgaaagggcggtgtcctgggcctctagacgaaggggacacgaaaattgcttatcacgcgttgcgtgatattttcgtgtagggtgagctttcattaatagaaagcgaacggccttattctcttcagcctcactcccaacgcgtaaacgccttgctattcacttttcatcagacaatctgtgtgagcactgcaaagtacgcttctttaaggtaaggaggtgatccaaccgcaggttcccctacggttaccttgttacgacttcaccccagtcatgaatcacaaagtggtaagcgccctcccgaaggttaagctacctacttcttttgcaacccactcccatggtgtgacgggcggtgtgtacaaggcccgggaacgtattcaccgtggcattctgatccacgattactagcgattccgacttcatggagtcgagttgcagactccaatccggactacgacgcactttatgaggtccgcttgctctcgcgaggtcgcttctctttgtatgcgccattgtagcacgtgtgtagccctggtcgtaagggccatgatgacttgacgtcatccccaccttcctccagtttatcactggcagtctcctttgagttcccggccggaccgctggcaacaaaggataagggttgcgctcgttgcgggacttaacccaacatttcacaacacgagctgacgacagccatgcagcacctgtctcacggttcccgaaggcacattctcatctctgaaaacttccgtggatgtcaagaccaggtaaggttcttcgcgttgcatcgaattaaaccacatgctccaccgcttgtgcgggcccccgtcaattcatttgagttttaaccttgcggccgtactccccaggcggtcgacttaacgcgttagctccggaagccacgcctcaagggcacaacctccaagtcgacatcgtttacggcgtggactaccagggtatctaatcctgtttgctccccacgctttcgcacctgagcgtcagtcttcgtccagggggccgccttcgccaccggtattcctccagatctctacgcatttcaccgctacacctggaattctacccccctctacgagactcaagcttgccagtatcagatgcagttcccaggttgagcccggggatttcacatctgacttaacaaaccgcctgcgtgcgctttacgcccagtaattccgattaacgcttgcaccctccgtattaccgcggctgctggcacggagttagccggtgcttcttctgcgggtaacgtcaatgagcaaaggtattaactttactcccttcctccccgctgaaagtactttacaacccgaaggccttcttcatacacgcggcatggctgcatcaggcttgcgcccattgtgcaatattccccactgctgcctcccgtaggagtctggaccgtgtctcagttccagtgtggctggtcatcctctcagaccagctagggatcgtcgccttggtgagccgttaccccaccaacaagctaatcccatctgggcacatccgatggcaagaggcccgaaggtccccctctttggtcttgcgacattatgcggtattagctaccgtttccagtagttatccccctccatcaggcagcttcccagacattactcacccgtccgccactcgtcagcgaagcagcaagctgcttcctgttaccgttcgacttgcatgtgttaggcctgccgccagcgttcaatctgagccatgatcaaactcttcaatttaaaagtttgatgctcaaagaattaaacttcgtaatgaattacgtgttcactcttgagacttggtattcatttttcgtcttgcgacgttaagaatccgtatcttcgagtgcccacacagattgtctgataaattgttaaagagcagtgccgcttcgctttttctcagcggcgcggggtgtgcataatacgccttcccgctacagagtcaagcatttctttgcttttctctgttgagattctcaggagaaccccgccgacccggcggcgtgtttgccgttgttccgtgtcagtggtggcgcattatagggagttattccggcctgacaagcgaaaaatataaaaactttatcgttcgctcacttttcaggcaaaacatcttaaatatagtcttttccgtctaacttatagacaaaaacgagccccgaagggctcgttttatcatttactggacggcgacaatccggtcttcattaacttccaggcgaatcactttacccggaaccaattcaccagacagtatttgctgtgccagcgggttttcgatctgctgctgaattgcacgtttcagaggacgtgcaccatagaccggatcgtaaccgttctcgctcagcagtttcagcgcctcgtcagaaatgtggatttcataaccacgttcttccagacgtttgtacagacgtttcaactgaatctgcgcaatgctggcaatgtgctgttcacccagcggatggaagaccaccacttcatcgatacggttaatgaattccggacggaagttatggcttaccacaccgagcaccagctctttcatgtgcgcataatccagttcaccgaagcgttcctgaatcagatcggaaccgaggttagaggtcataatgacgaccgtattacggaagtcgaccgttctcccttgcccgtcagtcagacgcccatcatccagtacctgcaacagaatgttgaagacatccggatgcgctttttccacttcatccagcaggatgacggaatacggacgacgacgcaccgcttcggtcaggtagccaccttcttcataaccgacatatcccggaggcgcaccaaccaaacgagacacgctgtgtttctccataaactcggacatatcgatacggaccatcgcctcgtcgctatcaaacataaagttcgccagcgccttacaaagctctgttttccccacaccagttgggccgaggaacaggaaactaccaatcgggcgatttggatccgccagccccgcacggctacgacgaatagcgttagataccgcatcaaccgcttcgttctgaccaattacgcgatggtgcagttcttgctccatacgcagcagtttttcgcgctcgctttccatcatgcgagaaaccggaatccccgtccaacgcgccagcacttcagcaatttcggcgtcggtcactttattacgcaacagacgcatagttttgccttcgagctgcgttgcggcttccagttgcttttccagttccgggattttgccgtattgcagttcagacatccgcgccaggtcccccacacggcgagcctgttcaatagcgattttcgcctgttccagttccgctttaatggtctgcgtaccagaaaggcttgccttctctgctttccactcttcttctaactcggagtactgacgttctttgtcgctcagttcttcgttgagcatatccagacgttttttactggcttcatcagactctttcattaacgcctgttgttccagtttgagctggatgatacgacgatcgagtcggtcgagttcttctggtttactgtcaatctgcatacgaatgctggatgctgcttcatcgatcaggtcgatggctttatccggcagctgacggtcagcaatgtagcgatgagacaacgtcgccgctgcaacaattgccgggtcagtaatttgcacatggtggtgcaattcgtaacgttctttcaggccacgcagaatcgcaatggtatcttcaacagaaggctcggcaacaaacactttctggaaacgacgttccagcgcagcatctttttcaatgtactggcgatattcgtcaagcgtcgtggcacctacgcagtgcaattcaccacgcgccagcgccggtttcagcatgtttccggcgtccattgcgccatcggctttacccgcgccgaccatggtatgtaattcgtcgataaataggatgacgttgccttcctgtttggcaagatcgttaagcacgccttttaaacgttcttcaaactcaccgcgatatttcgccccagccaccagcgcgcccatatccagcgccagtacccggcggcctttcaacccttccggcacttcgccgttgataatacgctgcgccagaccttcaacgatggcagttttaccgacgccgggttcaccaatcagtaccgggttatttttagtacgacgttgcagcacctgaatggtacggcgaatttcttcatcacgaccaatcaccggatcgagtttgccctgttcggctcgttcggtaaggtcgatggtatattttttcaaagcctgacgttggtcttcagcaccttgatcgttcacgctttcacctccacgcatttgttcaatcgcttgagtaatgttggcggtggtcgcccctgctgctttcaggatgtcggccagcgtgccgcgagactcaagtgccgccagaacgaacagttcactgctgataaagttatcaccacgtttttgcgccagcttgtcgcaaagattaagaacgcgcaccagatcctgacttggctggacatcaccaccagtaccttcaacctgcggtaaacgatttaatgcctgattgatatctgtgcgcaactggccagcatttatgccagcggatgttaataaaggactaacgctacccccttcctgattcagcagggcgctcattaaatgaagtggttcgataaattggttgtcgtgcccgagtgcaagactttgggcatcggcaagagcaagctggaatttattagtaagacgatccagacgcataactcctcccataacggatcaaagttgctactggagattaaatgaggtcatccctcaattattcaaggttattgaccagattaatgtgaaaagaaaatcacgcgtaccggatcgtcttgattctttaggttatatcagccaaatgaaacttgccatacgaccggtggtcttgtcgcgacgataagagaagaaagtctcattttccgtatatgtacaacggtcgccgccgaaaatttgctcaacacccacgttcgccagacgctgccgggcaagctgataaatatccgccagatacttatcaccatgctgaatgaaagctgcacttgctttagcgtctactgccataaacgcctcgcgaacctccccccccacttcgaacgcgcgtggaccaattgccggccctaaccaggcgagaatattttccggattatcagcaaaacaggaaaccgtctcttccagcacgcctgcgcacagtccacgccagccagcatgagcggcggcgacttccgttcccgctcgattgcaaaacagcacagggaggcagtcggcagtcatcactgcgcaaaccgtgccgggcgtattgctataagaggcatccgcccgtttactggcataaggttcgccagtgagcttaagcacatctttgccgtgtacctgctcaagccagaccggtttagaaggcaaattgcccgcagcaaaaagtcgcttgcgattctcctcaacgtgatccgggttatcgccacaatgggcaccgaggttgagactgtcatacgggggcaagctcacgccgccgatacgagtggagctacaggccgcaacaccttttggctgcggccactgcgggacaatcagcttactcataaccagtccacttcatccttatgttcttcgaaatcggcgcgcatcacctcaatcagctccaccatatcttgtggaataggcgcatgccattccatttcgatgccggagatcgggtgataaagacgcagcatggttgcatgtagcgcctggcggtcaaacttacgcagcgtggagataaatgcttcgctagcaccttttggcggacgcggacggccaccataaaccggatcgcccaccagcggatgagtgatatgggccatatgcacgcggatctggtgcgtacgtccagtttccagacgcaaccgcagacgcgtgtgcacacggaagtgttccatgatgcgatagtgagtcaccgctggtttgcccatcggatgcaccgccatatgggtacgtttggtcgggtggcgactgattggctcgtccaccgtgccacctgcggtcatatgaccaatcgccaccgcttcatactcacgagtaatttcacgccgttgcaaagattcgactaaacgcgtctgagccggaacggtttttgccacaaccatcaggccagtggtgtctttatccagacgatggacgatgcccgcacgcggtacatcggcaatgggtggatagtaatgaagcaacgcattcagtaccgtgccatccgggttacccgcgccaggatgtaccaccaggtcgcgcggtttattaatgataataatgtcttcatcttcatagacgatatccagcgggatatcctgcggttcaaaacgcgcttcttcttcaatctcagcgttgatggcaacctgctcgccacccaatactttttctttcggcttatcacaaactttgccgttaaccagcactcgctggtcgaggatccattcttttattcggctacgactataatccgggaacatttcggccaaagcctgatctaagcgttgaccgagttggttttcggacaccgttgcagtgagctgtactcgttgtgccatatatactgcttcttcgtttatcgttggggttttacggctttgccgtttaatatagtgtgctattgtagctggtcttaaccgggagcaggaacagagaatctcccgtattacattttgaggaaagtcaaaacgtcatgacgcgcatgaaatatctggtggcagccgccacactaagcctgtttttggcgggttgcagcgggagtaaggaagaagtacctgataatccgccaaatgaaatttacgcgactgcacaacaaaagctgcaggacggtaactggagacaggcaataacgcaactggaagcgttagataatcgctatccgtttggtccgtatagccagcaggtgcagctggatctcatctacgcctactataaaaacgccgatttgccgttagcacaggctgccatcgatcgttttattcgccttaacccgacccatccgaatatcgattatgtcatgtacatgcgtggcctgaccaatatggcgctggatgacagtgcgctgcaagggttctttggcgtcgatcgtagcgatcgcgatcctcaacatgcacgagctgcgtttagtgacttttccaaactggtgcgcggctatccgaacagtcagtacaccaccgatgccaccaaacgtctggtattcctgaaagatcgtctggcgaaatatgaatactccgtggccgagtactatacagaacgtggcgcatgggttgccgtcgttaaccgcgtagaaggcatgttgcgcgactacccggatacccaggctacgcgtgatgcgctgccgctgatggaaaatgcataccgtcagatgcagatgaatgcgcaagctgaaaaagtagcgaaaatcatcgccgcaaacagcagcaatacataacagaaacctgaaacacaaaacggcagcccttgagctgccgtttttttattctgtcagttgtgaaactgaagcgatttagtcgctatcgatctcatcaaatatggctcgctttgagatattcctcaagtaaaaaaacatctcttcctgcgatttctcacaaaaaagattcgttgacaaaaagtgacaaaattatgagattttcatcacacattttgacatcaggaacggtatgctgaattcaccaagacgggaagacaagaggtaaaatttatgacaatgaacattaccagcaaacaaatggaaattactccggccatccgccaacatgtcgcagaccgtctcgccaaactggaaaaatggcaaacacatctgattaatccacatatcattctgtccaaagagccacaagggtttgttgctgacgccacaatcaatacacctaacggcgttctggttgccagtggtaaacatgaagatatgtacaccgcaattaacgaattgatcaacaagctggaacggcagctcaataaactgcagcacaaaggcgaagcacgtcgtgccgcaacaagcgtgaaagacgccaacttcgtcgaagaagttgaagaagagtaatcctttatattgagtgtatcgccaacgcgccttcgggcgcgttttttgttgacagcgtgaaaacagtacgggtactgtactaaagtcacttaaggaaacaaacatgaaacacataccgtttttcttcgcattcttttttaccttcccctgaatgggaggcgtttcgtcgtgtgaaacagaatgcgaagacgaacaataaggcctcccaaatcggggggccttttttattgataacaaaaaggcaacactatgacaagcgaaaacccgttactggcgctgcgagagaaaatcagcgcgctggatgaaaaattattagcgttactggcagaacggcgcgaactggccgtcgaggtgggaaaagccaaactgctcagccatcgcccggtacgtgatattgatcgtgaacgcgatttgctggaaagattaattacgctcggtaaagcgcaccatctggacgcccattacattactcgcctgttccagctcatcattgaagattccgtattaactcagcaggctttgctccaacaacatctcaataaaattaatccgcacagtgcacgcatcgcttttctcggccccaaaggttcttattcccatcttgcggcgcgccagtatgctgcccgtcactttgagcaattcattgaaagtggctgcgccaaatttgccgatatttttaatcaggtggaaaccggccaggccgactatgccgtcgtaccgattgaaaataccagctccggtgccataaacgacgtttacgatctgctgcaacataccagcttgagcattgttggcgagatgacgttaactatcgaccattgtttgttggtctccggcactactgatttatccaccatcaatacggtctacagccatccgcagccattccagcaatgcagcaaattccttaatcgttatccgcactggaagattgaatataccgaaagtacgtctgcggcaatggaaaaggttgcacaggcaaaaagtccgcatgttgctgcgttgggaagcgaagctggcggcactttgtacggtttgcaggtactggagcgtattgaagcaaatcagcgacaaaacttcacccgatttgtggtgttggcgcgtaaagccattaacgtgtctgatcaggttccggcgaaaaccacgttgttaatggcgaccgggcaacaagccggtgcgctggttgaagcgttgctggtactgcgcaaccacaatctgattatgacccgtctggaaagtcgcccgattcacggtaatccatgggaagagatgttctatctggatattcaggccaatcttgaaagtgcggaaatgcaaaaagcattgaaagagttaggggaaatcacccgtagtatgaaggtattgggctgttacccaagtgagaacgtagtgcctgttgatccaacctgatgaaaaggtgccggatgatgtgaatcatccggcactggattattactggcgattgtcattcgcctgacgcaataacacgcggctttcactctgaaaacgctgtgcgtaatcgccgaaccagtgctccaccttgcggaaactgtcaataaacgcctgcttatcgccctgctccagcaactcaatcgcctcgccgaaacgcttatagtaacgtttgattaacgccagattacgctcactgctcataatgatgtcggcataaagctgcggatcctgagcaaacagtcgcccgaccatcgccagctcaaggcggtaaatcgggctagagagcgccagaagttgctcaagctgaacattttcttctgccaggtgcagcccgtaagcaaaagtagcaaagtggcgcagtgcctgaataaacgccatattctgatcgtgctcgacggcgctaatacgatgcagccgagcgccccagacctgaatttgctccagaaaccattggtatgcttccggtttacgtccatcacaccagaccacaacttgctttgccaggctaccgctgtccggaccgaacatcgggtgtagccccagcaccggaccatcatgcgccaccagcatggcctgtaatggcccatttttcacacttgccagatcgaccagaatacaatctttcggtaaaggcggtaatttgccaataacttgctcagtaacgtggattggcacactaacaatcaccattccggcatcggcaacaatatcagccgctcgatcccagtcatgttgctccagaatccgcacctgataaccgctgagggtcagcatcttctcgaacaggcgtcccatctgaccgccaccgccgacgataaccaccggacgcagactcggacaaagtgttttaaatcctttgtcgttttcactggagtaagattcacgcatcacccgacgcaaaacatcctcaatcagatctggcggtacacccagagcttccgcctctgcacgacggctggccaacatagatgcctcgcgctccggaacataaataggcagtccaaagcggcttttcacctcgcccacttcagcaaccagttccagacgcttcgctaataaattcagcagcgctttatcgacttcatcaatttgatcgcgtaatgcggtcaattcagcaaccataataaacctcttaagccacgcgagccgtcagctgcccgttcagatcctgatgaatttcacgcagcaaggcatcggtcatttcccagctaatgcaggcatcggttacggatacaccgtatttcatttcactgcgcggttgctcggaagactgattgccctcgtggatattactttcgatcatcagaccaataatactgcgattgccatctttgatttgagcaaccacggattctgccaccgcaggctgacggcgataatctttattggaattaccgtggctgcaatctaccatcagagacgggcgcagtcccgcctgttccatctctttttcacattgcgcaacatccgcagggctatagttcggcgctttaccaccgcgcaggatcacatggccgtccggattcccctgagtttgtagcaacgcaacctgccctgcctggttaatgccaacaaaacggtgcggctgggcggcggcgcgcatagcgttaattgctgttgccagactgccgtcggtgccgtttttaaaaccaaccggcatggaaagcccggaggccatttcacggtgagtttggctttccgttgtacgagcaccaattgcactccagctaaacagatcgcccaggtattgcgggctattcggatctaacgcttccgtcgccagtggcagtcccatattcaccagctcaagcagcaatttacgcgcgatctgcagcccggcttctacatcaaaagagccatccatatggggatcgttaattaaccctttccagccgacagtggtacggggtttttcaaaatagacgcgcattaccagatagaggctatcgctgacctctgcggcaagggctttaaatcgacgagcatattccagagcagtttccggatcatgaatggaacaaggaccacatactaccagcagacgaggatcgcgcccggcgataatatcactaatgcttttacggctgtcagcaatctgggcttcttgttgcaggctcaatggaaaagcggccttcagttgttccggagtcattaaaacctgttcgtcggtaatatgtacgttattcagcgcgtctttttgcatgatggcgatcctgtttatgctcgtttgcgatagttgatcctcagcgaggatgacgtaacgataacacataaagtaaagttttcaatccatatttcgtacatttttatttacacaggcaatttagtcgcgctttcaacccttacctctgtatagataaatttacactccctttgaaaacaatccgctatgctttgaaaaaggagaaagaaatgatgaaaaagtttatcgcccccttgttggctttactggttagcggatgtcagattgatccttatactcacgcgccaaccttgaccagcaccgactggtatgatgtcggtatggaagatgcgataagcggcagcgccataaaagatgacgatgcatttagcgatagtcaggcggatcgcggtctataccttaaaggatatgccgaaggacaaaagaaaacttgccagaccgattttacttatgcccgaggactttccggtaaaagctttcctgccagctgcaacaatgttgaaaatgccagccaactgcatgaagtaggcaaaaaggggctgatgaaaatgccagcacaatacgattaaattaattaaaaccccacaaataaattaaacataagattttactcattgtgttttatttctcacattgatgacggtcgcatgaaaaaatgatattttaatgagcattctgaaaaaatatcgatgcatttcgagcgaagatggtggggatccctgaatgcgtttttctcaccgactgttcttacttctgattctcctgctgacgggagcaccaatactcgctcaggagccttctgacgttgcgaaaaacgtgcgtatgatggtttccggtattgtcagttacacccgctggcctgcgctaagtgggccaccaaagttatgtatctttagttctagtcgttttagtaccgccctacaagagaatgccgcgacatctttgccttatctgcctgtcatcattcacactcaacaagaggcgatgattagtggctgcaatggtttttattttggcaacgagagtccgacattccagatggaattaaccgaacaatatccgagtaaggcgttattattaattgccgaacaaaataccgagtgcattattggtagcgccttttgtctgatcatccacaataatgacgtcagatttgccgtaaacctggatgccttaagccgtagcggtgtaaaggtcaacccggatgtcttaatgctcgcacggaagaaaaatgatggataacgataattctcttaataagcgccccacgtttaaaagagcattacgcaacatcagtatgaccagcatatttatcactatgatgctgatctggttgctgctttccgtgaccagcgtgctgaccctgaaacagtacgcgcaaaaaaacctggcactgacagcagcaacaatgacttacagtctggaagcagctgtcgtttttgccgatggccctgcagcaactgaaacactggcagcgctgggccagcaagggcaatttagtactgcagaagtacgtgataagcagcaaaatattctggcatcctggcattacacccgtaaggatccaggcgatactttcagtaatttcataagccactggctcttccctgcccccatcattcagccgattcgtcacaatggtgaaaccattggcgaagtacgcttaaccgctcgcgacagtagtatcagccattttatctggtttagcctcgccgtactgaccggttgtattctgctggcaagtggcatcgcaattaccctcacccgccatttgcacaatggcctggtagaagcgctgaaaaatatcaccgatgtcgtacatgatgtgcgttccaaccgcaatttttcccgacgagttagcgaagaacgtatcgctgagtttcaccgcttcgctctcgacttcaacagtctgctggatgaaatggaagagtggcagcttcgtttacaggctaaaaatgcgcagcttctacgtaccgcgctacatgacccattaaccgggctggctaaccgcgcagcgtttcgtagcggcatcaacacgttgatgaacaattccgatgcccgaaaaacgagcgcgttactatttcttgatggcgataatttcaaatacatcaatgatacctggggtcatgcgacgggcgatagagtcttgattgaaatcgcaaaacggttagctgaatttggcgggctgcgacataaagcataccgcctgggcggcgatgaattcgctatggtgctctatgatgtacagagcgaatctgaagtgcagcagatatgtagtgcactgacacaaatctttaatctcccgtttgatcttcataatggccatcagaccaccatgacattaagcattggttacgcgatgaccattgagcacgcctctgcggaaaaattacaagagcttgccgatcacaatatgtatcaggccaaacaccagcgtgccgaaaagctggtgagataacaaggatatatcgatatgataaagcacctggtagcacccctggttttcaccagtctaatactgactggctgccagtcccctcagggaaagtttactcctgagcaagtcgccgctatgcaatcttatggatttactgaatccgccggcgactggagcctgggcttaagtgatgccattctgttcgcaaaaaatgactacaaattgctcccggaaagccagcaacagatccaaaccatggcagctaaattggccagcacagggctaacacatgcccgtatggatggacacaccgataactatggtgaagacagttacaacgaaggcttaagtttgaaacgggcgaatgtcgtggccgatgcatgggctatgggtggacaaattccacgcagcaatctcaccacacagggtttaggaaaaaaatatcccatagccagtaacaagaccgcccagggccgcgccgagaaccgccgcgtcgcagtggtgattactaccccttaaaacaccagcaaacagataaaaaagggccagccaattggccagcccttcttaacaggatgtcgcttaagcgaaatcttagttaagacgctctttgatacgagcagccttaccagtacgctcacgcaggtagtacagtttagctttacgaacagcaccacgacgtttgacagaaatgctgtcaactaccggagagtgagtctggaagacacgctcaacgccttcgccgttggaaattttacgaacagtgaatgcagagtgcagaccgcggttacgaatagcgataaccacgccctcgaatgcctgcagacgttttttggaaccttcaacaacccatactttcacttccacggtatcacccggacggaaggaaggtacgtcctgcttcatctgctcttgttcaagttgcttaataatgttgctcataatttaatctcttatcctgggtaaactgatatctcgggggcttacgccatcccatcatgtttatgttgctgttgtgcgtgttccgttttgaactccgccagcaaccttgcttgctcttcagtcagagccaggttttccagaagttcaggtcttctaagccaggtacggcccaggctctgtttcaaacgccagcgacgtatctcggcatggttgccgctcagtaacactggcggaacttccatcccttctaacacctcaggccgcgtatagtgcgggcaatccagcaatccttcagcaaaggaatcttccgttgcgctggcttcatgtcccagtactcccggaataaaccgggaaacggagtcaatcagcgtcattgctggtaactcaccaccactgagaacgtaatcgccgatactccattcttcgtcaatttcggtttggatcacgcgctcatctataccttcgtagcgaccgcacaccagaatcaatttttgattcgttgccagttcgctgacgcccgcttgatcaagcttgcgtccctgtggactcagataaatcacctttgcgccttcacccgccgcggcttttgctgcatgaatggcgtcccgcaagggttgcaccatcattaacatccccggtccgccgccgtaaggacgatcgtccacggtacggtgccggtcatgcgtgaagtcgcgaggactccagctctggatgctcagcaggccatttttaactgcccggccagttaccccgtaatcggtaattgcgcggaacatttcaggaaacaggctaattatgccaatccacatagcgccgtcttttaccgtttatccggtggtttaaaaaccaggatcccaatctacttcgatactacgagtagtgagatcgactttcttgataacctgcccatcgaggaacggtacgagacgttccttgataccaaacgcatctttcaggtttgccttaatgacgagaacgtcattagatccggtttccatcatatcgacgactttaccgagatcgtagccttcagtggttactacctggcagcccatcaggtctttccagtagtagtccccctcttcaagctgaggcagctggctactatccacgacaatttcacaattcgtcagcaggttcgccgcatcacgatcgtcaacgcctttcagcttgatgatcatgtcctgattgtggtgcttccagctttccagctggacttgctgccactgacccgccttctggataaaccagggctgatagtcaaaaatgctttcggcgtcttcggtggaagaaaacactctgagccacccacgaataccgtaagagctacccatttttcccaaaacgatgggatcaacaggtgcttgcgcggtgagttgtttgctcatcatgaccaccgtgacagattaagctgctttgtttacttctttgatcagcgcagcaacgcgatcagaaatagttgcgccctggccaacccagtgagcgatgcgatccagatccaggcgagtgccttcttctttttcgctagcgattgggttgaagaaaccaacgcgctcgatgaagcgaccgttgcgtgcattacggctgtcagcgacaacaacctggtagaacggacgctttttagcgccgtgacgtgctaaacgaatagttaccataacatcctcttgtgtgaataaaacaaccggaccccatcgaggaacggagtccggtgtcatattaaaagcccgaaaattttactcatttttgcgggaattgcaatcaacagttgctaactctgctgtaaaaggccgtcggcggtgcagccagtttggtgccggagtgcgcgcagtcaccggagcgtacacgcagtacgtgaggatgacgagcacatcccggtgccaaaatggcaaacaagccaggccgattagcgaccagggaagcctgggggcatcatacccttcatgcttctcatcatcttcgccattccgcccttcttcattttcttcatcatgcgctgcatgtcgtcgaactgtttcagaagacggttaacgtcctgcacctgcataccgcaaccggcagcaatacggcgtttacggctacctttgatgatttctggcttagcgcgctctttcatcgtcatgctgttgatgatggcttccatacgcaccagcactttatcgtccatctgactcttgacgttatccgggatctgccccatgcccggcagcttgcccatcagactagccatgccgcccatatttttcatctggcgcagctgctcaagaaagtcgttgagatcgaagccgtcaccttttttcagcttgctggctaatttctctgcctgcgcgcggtcaactttgctttcgatatcttcgatcaggctcagtacgtcgcccatgccgagaatacggctcgcgatgcggtccggatggaacggctccagcgcctcagttttctcgccaacaccgaggaacttgatcggtttgccagtgatgtgacgaatagagagcgccgcaccgccgcgggcatcgccgtccactttggtcaacactacgccggtaagcggtaacgcttcattgaatgcttttgccgtattggccgcatcctgaccggtcatggcgtcaaccacaaacagggtttcaaccgggttaatgctcgcatggacttgtttgatctcgtccatcatcgcttcgtcaacgtgcagacgaccagcggtatccaccagcagcacgtcgtagaatttcagtttggcttctttcagcgccgcgttaacgatatctaccggcttctgaccaacatcagaagggaagaaatcaacgcccacctgctctgccagcgtctcaagctgtttgattgccgccgggcgataaacgtcggcagaaaccaccagcactttcttcttgtgcttctcgcgcaggaacttaccgagtttaccaacgctggttgttttaccggcaccttgcaggcccgccatcagtacgaccgcaggcggttgcgcagccaggttcagggtctggttctcttcgcccatcgccgcaaccagttcgttacggactattttgacgaactcctgccccggcgtcaggctcttattaacttcatgaccaaccgctttctcttttacgcgattgataaactcacgcactaccggcagagctacgtccgcctccagcagcgccatgcgcacttcgcgcagcgtatcttttacgttgtcttcagtgaggcgtccacggccactgatattgcgcagcgtgcggctcaaacgatcggttaaattatcaaacattgtctctcgcctggggtggaaacggttggccgcaatcgcgacacatcatcagtattttgccgcagtataacatgaaggcgtctttgttgttatgcaacggttggagcagcgtagtcctgacgctatactgcttctctttcttattgctcaaactgtcgacatcactatgcccgtttttgctctgctcgcgcttgtcgcctactccgtcagtcttgcgctgattgttcccggtctgctgcaaaaaaacggcggctggcggcgcatggctattatttctgcggtcattgcgctggtctgccacgcaatcgctctggaagcccgcatcctgcccgacggtgatagcggacaaaacctcagcctgctgaacgttggtagtttggtcagtttgatgatctgtacggtaatgaccattgtggcttctcgcaatcgtggctggctgctgctacccattgtctatgcctttgcgcttatcaacctggcgctggcaaccttcatgcccaatgaatacatcacccatctggaagctacgcctgggatgctggtgcacattggcttaagcctcttttcctatgccacgctaattatcgccgccctgtacgcgctgcaactggcgtggattgattaccaactgaagaacaagaagctggcgtttaaccaggaaatgccgccattgatgagtatcgagcgtaaaatgttccacatcacgcagattggcgtggtgctgctaacgctcacgctttgcactggcctgttctacatgcacaacttatttagcatggaaaatatcgacaaggctgtgctctctatcgtggcgtggtttgtctatattgtgctgctgtggggacattatcatgaaggatggcgtggacgccgcgtcgtctggtttaacgttgcgggcgcggtaattctgacactggcctacttcggcagccgaattgtccagcagttaatcagctaaacccagaaaaggagtttcccctggaacacatttctactactacgttgatcattattctgatcatcatggtggtcatttcagcctatttttccgggtccgaaaccggaatgatgaccctcaaccgctatcgtctgcgacatatggcgaaacagggtaatcgcagcgccaaacgcgtcgaaaaattgctgcgtaagccagaccgcctgataagcctggtgttaatcggcaataacctggtcaatattcttgcctccgcgctcggcactattgttgggatgcgtttgtacggcgatgcgggcgtggcaattgcgactggtgtgctgacttttgtcgtactggtatttgctgaggtattgccgaaaaccattgccgcgctgtacccggaaaaagtcgcttatccgagtagttttctgctggctccgctgcaaattttgatgatgccgctggtctggttgctgaatgctatcacccgtatgctgatgcgcatgatgggtatcaaaaccgatatcgtggttagcggctctttgagcaaagaagagttgcgcactatcgtgcacgaaagtcgcagtcaaatttcccgtcgcaatcaggatatgctgctgagcgtgctcgatctggaaaaaatgaccgttgatgacatcatggtgccgcgcagtgaaattatcggtattgatatcaacgatgactggaaaagcattctgcgccaactctcccacagtcctcacgggcgcatcgtgctctaccgtgatagcctggacgacgccatcagtatgctgcgagtacgtgaagcctggcggttgatgagcgagaaaaaagagttcaccaaagaaaccatgctgcgcgccgcggacgagatctattttgtgccggaaggtacgccgctcagcacgcagttggtaaagtttcagcgcaacaaaaagaaagtcggcctggtcgtcaacgagtatggagacattcaggggctggtgacggttgaagatattctggaagagattgtcggcgatttcactacgagcatgagcccaacacttgccgaagaggtcacgccgcaaaacgacggtagcgtgattatcgatggcaccgccaacgtgcgggaaatcaacaaagcctttaactggcatctaccggaagatgatgcccgcacggttaatggcgtcattcttgaggcactggaagagatccctgtcgcaggcacccgcgtgcgtattggcgagtacgatatcgatattctcgacgtacaggacaatatgattaagcaggtaaaagtttttcctgtgaaaccgctgcgcgagagtgtggcggagtaacgaaaacggcccggcattcgcatgcagggccgtgaattattacgaaagcagaaattaagcttttgctttcgctacagtaaccatcgccgcacgaatcgtacgaccattcagcgtataacccttctgcataatgcccagtacgttacctggcgcaacgtcatcagattccaccattgcgatggcctgatgcacattcgggtccagtgggacgttagtttcggcgatcacttcaacgccaaacttacgcacaacatccagcatgctcttcagcgtcagctcaatgccttcaaccatcgcagacatatccgggttagctttatcagccacttccagcgcacgatccaggctatcaatcaccggcagcaattcgttgatgaatttctccagcgcgaatttgtgggctttttcaatatccagttcagtacgacgacgcaggttttccatttcggcttttacacgcaaaatgccgtcacgttcacgggtctgggcttcagccagctgagcttcgagattcgcaactttttcatcgcgcggatccacctgctcagcagaagcttctggctcaactgcctcaatctcttcgtgctgatccatgataatttcttccggggcttgcccctcaggcgttttctgttctttactactcatgaatttctccgcgtttttttcgcattcatctcgctaacttcgcttattatggggatcagtttcagggtttcaagggaagcactcacattgtcatcaatcttcgcaacaaggacctcggaaaaatgaataatcatttcaagtgtattggcattgtgggacacccacggcaccccactgcactgacaacacatgaaatgctctaccgctggctgtgcacaaaaggttacgaggtcatcgttgagcaacaaatcgctcacgaactgcaactgaagaatgtgaaaactggcacgctcgcggagattgggcaactagctgatctcgcggtagtcgttggtggcgacggtaatatgctgggcgcggcacgcacactcgcccgttacgatattaaagttattggaatcaaccgtggcaacctgggtttcctgactgaccttgaccccgataacgcccagcaacagttagccgatgtgctggaaggccactacatcagcgagaaacgttttttgctggaagcgcaagtctgtcagcaagattgccagaaacgcatcagcaccgcgataaatgaagtggtgcttcatccaggcaaagtggcgcatatgattgagttcgaagtgtatatcgacgagatctttgcgttttctcagcgatctgatggactaattattagcacgccaacaggctccaccgcctattccctctctgcaggcggtcctattctgaccccctctctggatgcgattaccctggtgcccatgttcccgcatacgttgagtgcacgaccactggtcataaacagcagcagcacgatccgtctgcgttttagccatcgccgtaacgacctggaaatcagttgcgacagccagatagcactgccgattcaggaaggtgaagatgtcctgattcgtcgctgtgattaccatctgaatctgattcatccgaaagattacagttatttcaacacattaagcaccaagctcggctggagtaaaaaattattctaattttacgccagcctctttactgtatataaaaccagtttatactgtacacaataacagtaatggtttttcatacaggaaaacgactatgttggcacaactgaccatcagcaactttgctatcgttcgtgagcttgagattgattttcatagcggcatgaccgtaataactggcgagaccggcgcgggtaaatctattgcaatagatgccctcggtctttgtctcggtggtcgcgctgaagccgacatggtgcgtaccggcgctgctcgcgctgacctgtgcgcccgtttttctctgaaagatacgccagcggctctgcgctggctggaagaaaaccagcttgaagacgggcatgaatgtttgcttcgtcgcgtgatcagcagcgatggtcgctcccgtggtttcatcaacggtacagctgttcctctgagtcaactgcgcgaactgggtcagttgctgattcagatccatggtcagcacgctcatcaattactcaccaaacctgagcaccaaaaattcctgcttgatggctatgccaatgaaacctctctactgcaggaaatgaccgcacgttatcagttgtggcatcaaagctgccgtgacctcgcgcatcatcaacagttaagtcaggaacgcgccgcccgtgcggaactgctgcaataccaattaaaagaacttaacgaatttaatccgcagcccggagagtttgaacaaatcgacgaagagtacaaacgtctggcgaacagcggtcaattgctgaccaccagccagaatgcattggcattaatggccgacggtgaagacgcaaacctgcaaagtcagctttacacggctaaacaactggtgagcgaattgattggcatggacagcaaactgtccggcgtacttgatatgctggaagaagctaccatccagattgctgaagccagcgatgaactgcgccactactgcgatcgtctggatctcgatcccaaccgactatttgaacttgaacagcgcatcagtaaacagattagcctggcacgtaaacatcacgtcagccctgaggcattgccacagtattaccagagcctactggaagaacagcagcaactggacgatcaggccgacagtcaagaaacgcttgcgctggcggtaacgaaacatcatcagcaggcactggaaatcgcgcgcgcattacaccaacaacgccagcaatatgcagaagaacttgcacagctgatcaccgacagtatgcatgcgctcagtatgccgcatgggcagtttacgatcgatgttaaatttgacgagcatcacctgggcgctgacggtgccgatcgtattgagtttcgggtaaccaccaacccaggtcagccaatgcagcctattgccaaagtcgcatccggtggtgaattgtcccgcatcgcactggcaatccaggtcatcacggcgcgtaaaatggaaaccccggcactgatttttgatgaagtggatgtagggattagcggtccaacagcggcagttgtcggcaaactgctgcgtcaactcggcgaaagtactcaggtgatgtgtgttacccacctgccacaagtcgcgggatgtggtcatcaacactattttgtcagcaaagaaaccgatggtgcgatgacagaaacgcatatgcaatccctgaataaaaaagcgcggttacaagagctggcgcgcctgcttggtggcagtgaagtcacacgtaatacactggcgaatgcgaaagaactgcttgcagcgtaaacttttttcctgcttcacggtcagagtaaacagcaaaacgccgtaagaccggaaagcaaaaggttttaaagtgatgaaaggtctattatcatcggcatattacagatgagccacgtactgctcgggcccgaaaaggaatcaaatcactatgcgctgtaaaacgctgactgctgcagcagcagtactattgatgttgaccgcaggctgttccactctggagcgagtggtttaccgtcctgacatcaaccaggggaactatctgaccgctaacgacgtatccaaaatacgtgttggcatgacgcaacaacaagttgcgtacgcattgggtacaccgctgatgtccgatccatttggtacgaatacctggttctatgtcttccgccagcaaccaggtcatgaaggtgtaactcagcaaacgctgacgctgacctttaacagtagcggtgtgttgaccaatattgataacaaacctgcgctgagtggtaactaataataaagttgctctcaaagacgttaaaaaaggtgctcaatgagcaccttttttctgtctgttatttattcgcacttttttctgctcgttgcctgcgaagctctttcggatcggcaatgagagggcgataaatctccacccgatcgccatcatgcacactatcgcttagttttgccggacggctgtaaatgccgactttgtttttagttaaatcgatatcggtacgcaattccagcaagccactggcgcgaatagcttcttcaaccgtcgcgccctcctgcagcgtcactcgctgcaggtactgcttctcaggtagcgcataagccacctcaacggcaattttacctggcactgtaaacctctttcgcacgaaccgtaaaagcctggaccatattagccgccagctctttaaacacgcgaccaaaggcgagttcaatcaacttattggtaaactcaaagtcgagatgaaactcgatacgacacgcctcctggctcagcggcgtaaacttccatccaccaatcaatttcttgaacggcccatccaccagattcataagaatactttggttactggtcaactggttgcgggtagtaaacgttttgctgatcccagccttagagacatctaccgccgcagtcatctgcccaggagtggactccagaatccgacttccggtacaacccggcaaaaactgaggataagactgaacgtcattcactaactgatacatttgctccgcgctgtagggtaccagtgcggtccggctaatctgaggcataacaatttccatcaacaaaaatccaacaaataatatcatttatcctgctgtaaaaaaaacgctatcccggcgctgggtaacatcgggttcatgctaagatagagccttgtcccccgcaggattgatatggggtgttttcgatttcagattaccgatgattcacgacgcttatgacgaagaaaaaagcacataaacctggtagtgcgaccatcgcgcttaacaagcgcgcccgtcacgaatactttatcgaagaagagttcgaagcgggacttgccctgcaaggctgggaagttaaatccctgcgcgcaggaaaagccaatatcagcgacagctacgtccttctgcgtgacggagaggcatttctgtttggcgctaacatcacgccaatggccgtggcctccacgcatgtggtgtgcgatcctacccgtacccgcaagttacttctcaaccagcgcgaactggacagtttgtacggtcgcgtcaatcgagaaggctataccgtagtggcgctctccctgtactggaaaaatgcctggtgcaaagtgaaaatcggcgtcgccaaaggtaagaaacagcacgataaacgtagtgatatcaaagagcgcgaatggcaggtggataaagcacgtatcatgaaaaacgcccaccgttaaacctgcactccaattattgaccagttcctcaccgcgcctccctctccggcggcgcgaatgaacatcttattggctatcacatccgacacaaatgttgccatcccattgcttaatcgaataaaaatcaggctacatgggtgctaaatctttaacgataacgccattgaggctggtcatggcgctcataaatctggtatacttacctttacacattggggctgattctggattcgacgggatttgcgaaacccaaggtgcatgccgaggggcggttggcctcgtaaaaagccgcaaaaaatagtcgcaaacgacgaaaactacgctttagcagcttaataacctgcttagagccctctctccctagcctccgctcttaggacggggatcaagagaggtcaaacccaaaagagatcgcgtggaagccctgcctggggttgaagcgttaaaacttaatcaggctagtttgttagtggcgtgtccgtccgcagctggcaagcgaatgtaaagactgactaagcatgtagtaccgaggatgtaggaatttcggacgcgggttcaactcccgccagctccaccaaaattctccatcggtgattaccagagtcatccgatgaagtcctaagagcccgcacggcgcaagccctgcgggcttttttgtgccctcaatttgtcccgcgaagtccgaagagaactaattaaatccgaaccttttaggcccattgataggcccaacgaaaagctctattgtttacgttgggctaaacgcagggagactccccacctttgaaaacaggatgtagcgatgaaacttaacgacagtaacttattccgccagcaggcgttgattaacggggaatggctggacgccaacaatggtgaagccatcgacgtcaccaatccggcgaacggcgacaagctgggtagcgtgccgaaaatgggcgcggatgaaacccgcgccgctatcgacgccgccaaccgcgccctgcccgcctggcgcgcgctcaccgccaaagaacgcgccaccattctgcgcaactggttcaatttgatgatggagcatcaggacgatttagcgcgcctgatgaccctcgaacagggtaaaccactggccgaagcgaaaggcgaaatcagctacgccgcctcctttattgagtggtttgccgaagaaggcaaacgcatttatggcgacaccattcctggtcatcaggccgataaacgcctgattgttatcaagcagccgattggcgtcaccgcggctatcacgccgtggaacttcccggcggcgatgattacccgcaaagccggtccggcgctggcagcaggctgcaccatggtgctgaagcccgccagtcagacgccgttctctgcgctggcgctggcggagctggcgatccgcgcgggcgttccggctggggtatttaacgtggtcaccggtagcgcgggcgcggtcggtaacgaactgaccagtaacccgctggtgcgcaaactgagctttaccggtagcaccgaaattggccgccagttaatggaacagtgcgcgaaagacatcaagaaagtgagcctggagctgggcggtaacgcgccgtttatcgtctttgacgatgccgacctcgacaaagccgtggaaggcgcgctggccagcaaattccgcaacgccgggcaaacctgcgtctgcgccaaccgcctgtatgtgcaggacggcgtgtatgaccgttttgccgaaaaattgcagcaggcagtgagcaaactgcacatcggcgacgggctggataacggcgtcaccatcgggccgctgatcgatgaaaaagcggtagcaaaagtggaagagcatattgccgatgcgctggagaaaggcgcgcgcgtggtttgcggcggtaaagcgcacgaacgcggcggcaacttcttccagccgaccattctggtggacgttccggccaacgccaaagtgagcaaagaagagacgttcggccccctcgccccgctgttccgctttaaagatgaagctgatgtgattgcgcaagccaatgacaccgagtttggccttgccgcctatttctacgcccgtgatttaagccgcgtcttccgcgtgggcgaagcgctggagtacggcatcgtcggcatcaataccggcattatttccaatgaagtggccccgttcggcggcatcaaagccagcggtctgggtcgtgaaggtagcaagtatggcatcgaagattacttagaaatcaaatatatgtgcatcggtctttaactggagaatgcgaatgaacagcaataaagagttaatgcagcgccgcagtcaggcgattccccgtggcgttgggcaaattcacccgattttcgctgaccgcgcggaaaactgccgggtgtgggacgttgaaggccgtgagtatcttgatttcgcgggcgggattgcggtgctcaataccgggcacctgcatccgaaggtggtggccgcggtggaagcgcagttgaaaaaactgagccacacctgcttccaggtgctggcttacgagccgtatctggagctgtgcgagattatgaatcagaaggtgccgggcgatttcgccaagaaaacgctgctggttacgaccggttccgaagcggtggaaaacgcggtaaaaatcgcccgcgccgccaccaaacgtagcggcaccatcgcttttagcggcgcgtatcacgggcgcacgcattacacgctggcgctgaccggcaaggtgaatccgtactctgcgggcatggggctgatgccgggtcatgtttatcgcgcgctttatccttgcccgctgcacggcataagcgaggatgacgctatcgccagcatccaccggatcttcaaaaatgatgccgcgccggaagatatcgccgccatcgtgattgagccggttcagggcgaaggcggtttctacgccagcagcccagcctttatgcagcgtttacgcgctctgtgtgacgagcacgggatcatgctgattgccgatgaagtgcagagcggcgcggggcgtaccggcacgctgtttgcgatggagcagatgggcgttgcgccggatcttaccacctttgcgaaaagcatcgcgggcggcttcccgctggcgggcgtcaccgggcgcgcggaagtaatggatgccgtcgctccaggcggtctgggcggcacctatgcgggtaacccgattgcctgcgtggctgcgctggaagtgttgaaggtgtttgagcaggaaaatctgctgcaaaaagccaacgatctggggcagaagttgaaagacggattgctggcgatagccgaaaaacacccggagatcggcgacgtacgcgggctgggggcgatgatcgccattgagctgtttgaagacggcgatcacaacaagccggacgccaaactcaccgccgagatcgtggctcgcgcccgcgataaaggcctgattcttctctcctgcggcccgtattacaacgtgctgcgcatccttgtaccgctcaccattgaagacgctcagatccgtcagggtctggagatcatcagccagtgttttgatgaggcgaagcagtaacgccgctcctatgccggaggcgacgctgcgcgtcttgtccggcctacggggatccaggtcggataaggcgtttacgccgcatccgacaatctgtacgtgaacaggaagaaatctatgttggccgggtaaggcggagccgctctccggcaaaaagaatcaataacaattatacgcgtgacccggcgcgggaaatgtcggggcgctctcccaagtgacacactttcgagaggattcaggatggggcaaagtagccaaccacatgagttaggcggcgggctgaagagtcgccacgtcaccatgttgtctattgccggtgttatcggcgcaagtctgtttgtcggttccagcgtcgccatcgccgaagcgggcccggcggtattactggcctatctgttcgccgggctactggtggttatgattatgcggatgttggcggaaatggcggttgccacgcccgataccggtagcttttccacctatgccgataaagccattggtcgctgggcgggctataccatcggctggttgtactggtggttttgggtactggttatcccgctggaagccaacatcgccgccatgatcctgcacagttgggttccaggcattcccatctggttattttccctcgtcattaccctcgccttaactggcagtaacttattaagcgttaaaaactacggcgaatttgagttctggctggcgctgtgcaaagtcatcgctatcctggcctttattttccttggtgcagtcgcaattagcggtttttacccgtatgccgaagtgagcgggatcagtagattgtgggatagcggcggctttatgcccaacggtttcggtgcggtattaagcgcgatgttgatcaccatgttcagctttatgggcgcagaaattgtcaccattgccgccgcggaatccgacacgccggaaaaacatattgtccgcgccaccaacagcgttatctggcgtatttctatcttctatttatgttctatttttgtcgtcgtggcattaattccgtggaatatgcccggactaaaagccgtcggttcttatcgcagcgtactggaattgctcaatattccccatgcgaaattaatcatggactgcgtgatattactttccgtaaccagttgcctgaacagcgcgctgtataccgcgagtaggatgctctactccttaagtcgtcgcggtgatgctcccgcggtaatgggtaaaatcaaccgcagtaaaaccccgtacgtggcggtgttactctccaccggcgcggcattcttaacggtggtggtgaactattacgcgcctgcgaaggtatttaaatttctgatcgacagctccggcgctatcgccctgctggtttatttagtcatcgccgttagtcagttgcggatgcgcaaaattctgcgagcagaaggaagcgaaattcgcttgcgaatgtggctttatccgtggctcacctggctagtcatcggctttattacctttgtgttggtagtgatgctattccgtccggcgcaacagttagaagtgatctccaccggcttattagcgatagggattatctgtaccgtgccaattatggctcgctggaaaaagctggtattgtggcaaaaaacacccgttcataatacgcgctgatcatgatcaggagtcacaccatgaccattacgtctctggatggctatcgctggctgaagaacgatattattcgcggtaattttcaaccggatgaaaaattacgaatgagtttgctgacaagccgttatgcacttggcgttgggccgttacgggaagctcttagccaactggtggcggaacggctggtcacggtggtgaatcaaaaagggtatcgggtggcgtctatgagtgagcaggagctgctcgatattttcgacgcccgcgccaatatggaagcgatgttagtgagtctggcgattgcccgcggtggcgatgagtgggaggcagacgttctcgcaaaagcgcatctgctgagtaagcttgaggcctgtgacgccagcgagaaaatgcttgatgagtgggatctgcgtcatcaggcgtttcatacggcaattgtggcgggctgtggttctcactatttgctgcaaatgcgtgaacggttgtttgatctggcggcgcgttatcgatttatctggctgcggcgaacggtgcttagcgtggaaatgctggaggataaacacgatcagcaccagaccctgactgcggcggtactggcgcgagataccgcgcgcgccagtgagttaatgcgccagcatttactgacgccaattcccattatccagcaggcgatggctggcaattaattactcttccggaatacgcaacacttgccccggataaattttatccgggctttttagcatcggtttattcgcttcgaagattttattgtacagattagcgttaccgtagacctgtttggaaatggcactcagagtgtcgccagacttaacggtataaaactggctggcagtggctggtgtcgccgttttcacctgatcatcgacactggcaataccggaaatattccccaccgcaacaaggattttctccttcgcctcctgactcaggccgtcaccagtgaccgtcgctttgccgtcggcaatttgaatattcactttatcggcatccggtataccggttttgttcagatgctcctgcaccttcttcgcctgatcgtctttatcgtgctgacctgtaaccgcgtcccagagtttttctccggcatctttcacaaaattgaacagacccatagctacctcattcgttaacggaaacactcagaaagtgtagcagaggaacgcggcgcgttaacgccgcggggatgagcacaggtttaatcgcgggtttgcacccagaacgcgtgaatcaaaccggggatatacccaagcagtgtcaacagaatattaataatgaacgcccaaccgaaccctttaccgagcagcacgccgagcggcggcagaatgatggtgatgacgattctccagaaacccatatgtactccctataagaaaattactcattgtttaaaaagagattttatctcttaagcgtagtaattttagcggagcctgccagtttcagcttacgcttttactctcatttacgctgctgaggctggtatatgttgcatttttagtttagagtttacttaatttagaaaatacttaaataaatatgactgaactcgcgcaattacaggccagtgccgaacaggcagcggccttattgaaagcaatgagccaccctaaacgattgctgattctgtgcatgcttagcggttcccccggcaccagcgcgggagagctgacgcgcattaccggactgagtgcctctgcgacaagtcagcatctcgctcgtatgcgggacgaagggcttatcgacagccaacgggatgcccaacgcattctatattccattaaaaatgaggcggtaaatgccattatcgccaccctgaaaaatgtctattgtccgtaaggagtcactatggctttgacaaccattagcccgcatgatgcacaagaattaatcgcacgcggcgcaaagttaatcgatattcgtgatgctgatgaatatcttcgtgaacatattcctgaagcagatctggctccattatccgtgctggaacagagtggtcttccggctaaattacgtcacgagcaaattatattccactgccaggcaggtaaacgcaccagtaataatgccgataaattagcagcgattgccgcccccgcagaaatctttttactcgaagatgggattgatggctggaaaaaagcaggattgccagtagcggtaaataaatctcaacccttgccgttaatgcgccaggtgcagatcgctgcgggtggtttaatattaatcggcgttgtactgggttataccgtaaatagcggtttcttcttattaagtggctttgttggtgccgggttactgtttgcaggaatcagcggtttttgtggaatggcaaggttgttagataagatgccgtggaaccaacgagcttgagaagcgacgccggacgcgccctagcagcgacatccggcctcagtaattagatcaggaaatcgtcgagagatttaccttctgccagcgcctgagcaattggcttcggtgtacggccctgaccggtccaggttttagtttcaccgttaacatcggtgaatttatatttcgccggacgcggctggcgttttttaccagcgcgtggtgcagcagcagagctattacccaataactcttccgggttaattccgtcagctttcatcagctccagccaggtgctaattttttcctggcgctctgccagttcacgctgctgctgttcttcttcttcacgtctttctttagtgacaaccctgaatttttcgagcatttcttcaagaacgtcaatggagaattcgcgagccatcgcacggagggtgcgaatgttatttaaactttgtaacattacggacataataaagaaaaccttttaacgccaaaacaaaaaaagtatttcgtcgcgtagtgtaagcgatcacttattatatttccacaaaatttaatctatttacagtcctgcgcgagattatttcagctgttattttctgaaactctcagaataatttcaagattatatattagccattttgatgagtaatttagattattggtgaacagagcggcgctctctgctcgctaattccgcaagcctgacaaaatcaaagtgaataaaaatgcaatataacagaataaaagaaaacatccatcactggtgctttctgctgttaatgtacattgtctggcataaaaaatgctgaaaatgacccagctactacatacaccgaattctctacgcttatagcgttacctcacccccaaactttcattagtgatattaaaggtaaggccatatctaattgatttaattaaaaataaatcatatcggcatgtaaaaatccacaatgtacaaaaaacgagccgttacggaatattttatctacaaaaactgactaaataaaaatttttcactaattgattagtcatagccagcgatatacgctatgcgaaaatgcagatggcaatgagatccactgctttcatctccattaacatcccattacgcttttattaaggagcattagcatgttcagtccgcagagtcgcttgcgtcatgcagttgcagatacgttcgcgatggttgtttactgttctgtcgtgaacatgtgtattgaagttttcctctccggaatgagcttcgaacagtctttttattccagattggtagcgattccggtgaacatcttaattgcatggccatacggtatgtaccgtgatctgtttatgcgcgcggcacgcaaagttagcccgagcggctggataaaaaatctggcggatatcctggcttatgtgacgttccagagtccggtgtatgtggcgatcttgttagtggtgggcgcagactggcatcagattatggcggcggtcagtagtaacatcgttgttagcatgttgatgggggcggtttatggctacttcctcgattattgccgccgactgtttaaagtcagccgttaccagcaggtaaaagcctgactcttcttttcgcgactggcatcgccagtcgcgtctttaactggcttcgccaaataaaccattcaaataacgttcaagcgcaacacggctactaaagccatgcgggataccgtaatgctcgtgtcgctcgcctgctaaatagagcggaaattgctggtaatgatcgcaagttttaatatcggaagcgggttcagccagtgtgctactgcgttcttttaatgttggatgaattaccagagcggtacgtcccattcgcgcttcgcgattaacatagacataattttccccacggcggtaaccatacgctttctgggttaccacatcgacagtaaaaccgactttttcaagtacgcgcgccacctcgtctggtcgtaaatacatatttgatcctcgttattatcaaccgcgggcctaccttacctgattgcgcattcacaacgctttcagaaaagtccataaagccgcgatgaacctcagttaagaaaattatggtctacactgaaaattacatcgaattctaatgggggatcatatgtttaaccgaccgaaccgcaacgacgttgatgatggcgtgcaggatatccagaatgatgtcaatcaattagctgacagcctcgaatctgtattgaagtcctggggcagcgacgccaaaggggaagctgaagccgcacgcagtaaagctcaggcattgctgaaagaaaccagggcgcgaatgcatggtcgtactcgcgtccagcaagccgcgcgcgatgccgttggctgcgcggattcttttgttcgtgaaagaccctggtgtagcgtgggtacagcagctgcggtaggtatttttatcggcgcactgttaagcatgcgcaaaagctaatgcaaaaatgataataaatacgcgtctttgaccccgaagcctgtcttcggggtttctttttgcctggtgaatcacaaaaatccccctaccccgtcacgctcatatccagggtaatttcgaccactatttgctatatattgtgtggttgaatcttttttcaactacatctagtatctctgtatcaacagagagacaacccgacgcgtatcatcgcgccgtatcttcattttaaacggaaatacgaatcatgcgcattactatttacactcgtaacgattgcgttcagtgccacgccaccaaacgggcgatggaaaaccggggctttgattttgaaatgattaatgtcgatcgcgttcctgaagcggcagaagcgttgcgtgctcagggctttcgtcagttgccggtagtgattgctggcgatcttagctggtctggtttccgtccggacatgattaaccgtctgcatccagcgccacacgcggccagtgcatgagccagctcgtctacttctccagcagctccgaaaacacgcagcgttttatcgaacgtttaggtctgcccgcggtgcgcatcccgctcaatgagcgggaacggattcaggtagacgagccttacatcctgatcgtgccctcttacggcggcggcggtacggctggcgcggtgccacgacaggtaattcgctttttaaacgacgagcacaaccgggcgttgcttcgcggcgttattgcttctggtaatcgcaactttggtgaggcgtatggccgcgccggagatgtgattgcccggaaatgcggcgtgccgtggctgtaccgttttgaactcatgggtacgcaaagcgatatcgaaaacgttcgtaaaggagtaaccgaattttggcaacgacaaccgcagaatgcctgacgcaggaaacgatggattaccacgcgctgaatgcgatgcttaacctctacgatagcgcaggtcgcattcagttcgataaagaccgccaggccgttgacgcctttattgcgacgcatgtgcgtccgaacagtgtgaccttcagtagccagcagcagcgcctgaactggctggtcaacgaaggttactatgatgaaagcgttcttaatcgctactctcgcgactttgtcattacgctgtttacccacgcacacaccagcggttttcgtttccagacattcctcggggcatggaagttttacaccagctatacgttgaagacattcgacggtaaacgttatctggaagattttgccgatcgagtaacgatggtggcgctgacgctggcacaaggcgatgagacgctggcgttgcaactgaccgatgaaatgctgagtggacgctttcagccagccacgccaacattcctcaactgcggtaagcagcagcgcggcgaactggtttcctgttttttgctgcgtattgaagacaatatggagagcattggtcgggcggtaaattccgcactgcagctgagcaaacgcggcggcggcgtagcatttttgctgagcaatctgcgagaagcgggcgcgccaattaaacgtattgaaaatcaatcttctggcgtaattccggtgatgaaaatgctggaagacgcattttcctatgccaaccaactcggcgctcgtcagggggctggtgcagtctatttacatgctcatcatcccgatattctgcgttttctcgacacgaaacgggaaaatgccgacgaaaaaatccgcattaaaacactgagccttggcgtggtgatcccggatatcactttccatctggcaaaagagaatgcgcagatggcgctgtttagcccttatgacgtagagcgagtttatggcaagccgtttgccgatgtggccatcagccaacactatgacgaactggttgccgatgaacgcattcgcaaaaaatacctcaacgcccgtgatttcttccagcgactggcagaaatccagtttgagtccggctatccctacatcatgtatgaagacacggtaaaccgtgctaaccctatcgccgggcgcataaatatgagtaatctctgcagtgaaattttgcaggttaacagcgccagtgagtatgacgagaatctcgactatacccgcacaggccatgatatttcctgcaatttaggtagcttgaatattgcgcacaccatggattcccccgattttgcccgcacggtagagactgccgtgcgcggtttaacggcagtaagtgatatgagtcatatccgcagcgtgccgtccatcgaagccggaaatgccgccagccacgccatcggactggggcagatgaatttacacggctatctggcgcgagaaggcatcgcttatggtagcccggaagcactggatttcaccaatctctatttctatgccatcacctggcatgcactgcgtaccagcatgttgctggcacgcgaacgcggtgaaaccttcgccgggttcaaacagagtcgctatgccagtggtgaatattttagccaatatctgcaagggaactggcagccgaaaacggcgaaagttggcgaactgtttacccgtagcggtattacgttacctacccgtgagatgtgggcgcagctgcgcgacgacgtgatgcgctacggcatatacaaccagaatcttcaggcggtgccgccaaccggttctatctcttatatcaaccatgctacgagcagtattcatccgattgtggcgaaagtagagatacgcaaagagggcaaaacaggacgcgtttactaccctgccccgtttatgactaacgagaatctggcgctgtatcaggacgcttacgaaattggcgcagaaaagatcatcgacacctacgcggaagcgactcgccatgtcgatcaggggctgagcctgacgctttttttccccgataccgccaccactcgcgatatcaacaaagcgcagatttacgcctggcgcaagggtatcaaaacgctctattacatccgcctgcgtcagatggcgctggaaggcactgaaattgaaggctgcgtctcctgtgcactttaaggaatatctatgaaactcagtcgtatcagcgccatcaactggaacaagatatctgacgataaagatctggaggtgtggaatcgcctgaccagcaatttctggctaccagaaaaggtgccgctgagcaacgatattcctgcctggcagacattaactgtcgtagaacaacaactgacgatgcgcgtttttactggcctgacgctgctcgacacgctgcaaaatgttatcggcgcgccttctctgatgcccgatgcactcacgcctcatgaagaagcggtattaagcaatatcagctttatggaagcggttcatgcccgctcttacagtagcattttcagcacgctatgccagaccaaagatgtcgatgccgcctacgcctggagtgaagaaaacgcaccgttgcagcgaaaagctcagattattcagcaacattatcgcggtgatgatccgctgaaaaagaaaatcgccagtgtgtttcttgaatcttttttgttctattccggtttctggctgccgatgtatttttccagccgcggaaagctgaccaataccgcggacctgatccgtctgattatccgcgatgaagcagtccacggttactacataggctataaatatcagaaaaacatggaaaagatatctctgggacaacgtgaagagttgaagagtttcgccttcgatttgttgctggaactctacgacaacgagttgcaatacaccgatgagctgtacgccgaaaccccgtgggctgacgatgtgaaagcgtttctctgttacaacgccaataaggctttgatgaatctgggctacgaaccgttatttcccgcagaaatggcggaagtgaatccggcaatcctcgccgcgcttagcccgaatgccgatgaaaatcacgatttcttttccggtagtggctcctcttatgtgatggggaaagcggttgaaacagaagatgaagactggaatttctgagggtgttattttcaaaaatatcactacccgcagcagggaaataattcccgccaaatagctttttatcacgcaaataatttgtggtgatctacactgatactctgttgcattattcgcctgaaaccacaatattcaggcgttttttcgctatctttgacaaaaaatatcaactttctcgatttgctctcagcccttatatcacgggaaattccggcgatttgctcgcatcaatattcatgccacatttgccatcaggggttgcctcagattctcagtatgttagggtagaaaaaagtgactatttccattgggtaatatatcgacatagacaaataaaggaatctttctattgcatggcaattaaattagaaattaaaaatctttataaaatatttggcgagcatccacagcgagcgttcaaatatatcgaacaaggacttagtaaagaacaaattctggaaaaaactgggctaagccttggcgtaaaagacgccagtctggccattgaagaaggcgagatatttgtcatcatgggattatccggcagcggtaaatccacaatggtacgccttctcaatcgcctgattgaacccacccgcgggcaagtgctgattgatggtgtggatattgccaaaatatccgacgccgaactccgtgaggtgcgcagaaaaaagattgcgatggtcttccagtcctttgccttaatgccgcatatgaccgtgctggacaatactgcgttcggtatggaattggccggaattaatgccgaagaacgccgggaaaaagcccttgatgcactgcgtcaggtcgggctggaaaattatgcccacagctacccggatgaactctctggcgggatgcgtcaacgtgtgggattagcccgcgcgttagcgattaatccggatatattattaatggacgaagccttcagcgcgctcgatccattaattcgcaccgagatgcaggatgagctggtaaaattacaggcgaaacatcagcgcaccattgtctttatttcccacgatcttgatgaagccatgcgtattggcgaccgaattgccattatgcaaaatggtgaagtggtacaggtcggcacaccggatgaaattctcaataatccggcgaatgattatgtccgtaccttcttccgtggcgttgatattagtcaggtattcagtgcgaaagatattgcccgccggacaccgaatggcttaattcgtaaaacccctggcttcggcccacgtagcgcactgaaattattgcaggatgaagatcgcgaatatggctacgttatcgaacgcggtaataagtttgtcggcgcagtctccatcgatagccttaaaaccgcgttaacgcagcagcaaggtcttgatgcggcgctgattgatgcgccgttagcagtcgatgcacaaacgcctcttagcgagttgctctctcatgtcggacaggcaccctgtgcggtgcccgtggtcgacgaggaccaacagtatgtcggcatcattagcaaaggaatgctgctgcgcgctttagatcgtgagggggtaaataatggctgatcaaaataatccgtgggataccacgccagcggcggacagtgccgcgcaatccgcagacgcctggggtacaccgacgactgcaccgactgacggcggtggtgctgactggctgaccagtacgcctgcgccaaacgtcgagcattttaatattctcgatccgttccataaaacgctgatcccgctcgacagttgggtcactgaagggatcgactgggtcgttacccatttccgtcccgtcttccagggcgtgcgcgttccggttgattatatcctcaacggtttccagcaattgctgctgggtatgcccgcaccggtggcgattatcgttttcgctctcatcgcctggcagatttccggggtcggaatgggtgtggcgacgctggttagcctgattgccatcggcgcaatcggtgcctggagccaggcaatggtgactctggcgctggtgttaaccgccctgctgttctgtatcgtcatcggtttgccgttggggatatggctggcgagaagtccgcgagcggcgaaaattattcgtccactgcttgatgccatgcagaccacgccagcgtttgtttatctggtgccaatcgtcatgctatttggtatcggtaacgtgccgggcgtggtggtgacgatcatctttgctctgccgccgattatccgtctgaccattctggggattaaccaggttccggcggatctgattgaagccagccgcagtttcggtgccagcccgcgccagatgctgttcaaagttcagttaccgctggcgatgccgaccattatggcgggcgttaaccagacgctgatgctggccctttctatggtggtcatcgccagcatgattgccgtcggcgggttgggtcagatggtacttcgcggtatcggtcgtctggatatggggcttgccaccgttggcggcgtcgggattgtgatcctcgccattatcctcgatcgtctgacgcaggccgttgggcgcgacagtcgcagtcgcggcaaccgtcgctggtacaccactggccctgttggtctgctgacccgcccattcattaagtaactctgcacttgcccggtgacgccgggcattatcaccctgccaaaaaaaggaataacaatgcgacatagcgtactttttgcgacagcgtttgccacgcttatctctacacaaacttttgctgccgatctgccgggcaaaggcattactgttaatccagttcagagcaccatcactgaagaaaccttccagacgctgctggtcagtcgtgcgctggagaaattaggttataccgtcaacaaacccagcgaagtagattacaacgttggctacaccagccttgcttccggcgatgcaaccttcaccgccgtgaactggacgccactgcatgacaacatgtacgaagctgccggtggcgataagaaattttatcgtgaaggggtatttgttaacggcgcggcacagggttacctgatcgataagaaaaccgccgaccagtacaaaatcaccaacatcgcacaactgaaagatccgaagatcgccaaactgttcgataccaacggcgacggaaaagcggatttaaccggttgtaaccctggctggggctgcgaaggtgcgatcaaccaccagcttgccgcgtatgaactgaccaacaccgtgacgcataatcaggggaactacgcagcgatgatggccgacaccatcagtcgctacaaagagggcaaaccggtgttttattacacctggacgccgtactgggtgagtaacgaactgaagccgggcaaagatgtcgtctggttgcaggtgccgttctccgcactgccgggcgataaaaacgccgataccaaactgccgaatggtgcgaattatggcttcccggtcagcaccatgcatatcgttgccaacaaagcctgggccgagaaaaacccggcagcagcgaaactgtttgccattatgcagttgccagtggcagatattaacgcccagaacgccattatgcatgacggcaaagccagtgaaggcgatattcagggacacgttgatggttggatcaaagcccaccagcagcagttcgatggctgggtgaatgaggcgctggcagcgcagaagtaatttttattcgggcggataaggcgtttttgccgcatccgccgttctgtgcacaatgcctgatgcgacgctggcgcgtcttatcatgcctacaaaccacatcgcacatttcaacaatctatctttcatcccatattcatcaacatccgctattattgatttccagcttaatcatcacctgatgaacaaaaataatgactaaacctaatcatgagcttagcccggcgctgatcgtgctgatgtctatcgccaccggtctggcggtagccagtaactattacgcccagccattgctcgacaccatcgcgcgtaacttttccctttccgccagtagcgcaggctttattgttaccgccgcgcagttgggctatgccgcaggtctactgtttcttgttcccctcggtgatatgtttgaacgccgccgcctgattgtcagcatgaccttactggcggcatgttgattaccgccagcagtcagtcgctggcgatgatgatcctcggtacggcattaaccggtttattcagtgtcgtggcacaaattctggttccgctggcagcgacgctggctagtccggataaacgcggcaaagtggttggcactattatgagcggtctgctgttggggatcttgctggcacggacagttgccggattgctggcgaatctcggcggctggcgcaccgtcttttgggttgctagcgtgttaatggcactgatggcgctggcattatggcgtggtctgccacaaatgaaaagtgaaacccacctcaactacccacagttgttgggttccgttttcagtatgtttatcagcgataaaattctgcgtacccgcgcgttgctgggctgcctgacctttgccaatttcagcattctctggaccagtatggcctttttgcttgccgctccaccttttaactacagcgatggtgtcattggtctgtttggacttgcgggagctgccggagcgttgggcgctcgtccggcgggcggttttgccgataagggcaaaagccaccacaccacaactttcggtctgctgctgctattacttagttggctggcgatctggtttggtcacacttccgtactggcgttgattatcggaatcctggtgctggatctcaccgtgcagggcgtgcatatcactaaccagacggtaatttatcggatacatcctgatgcgcgcaatcgcctgaccgcaggttacatgactagctactttattggcggtgccgccggtagcctaattagtgccagtgcctggcaacatggcggttgggctggcgtttgtctggctggcgcgacgattgccctggttaacttactggtctggtggcgaggttttcatcgtcaggaagccgcaaattaagcaatcagcaaccgttttcgtggctttacacttataagggtgttaagaagcccatcagtctgataaggttaagatattcattcagtctatttataatattaacaatcgttaagcgtacactctatggaaagccctactccacagcctgctcctggtagcgcgaccttcatggaaggatgcaaagacagtttaccgattgttattagttatattccggtggcctttgcgttcggtctgaatgcgacccgtctgggattctctcctctcgaaagcgtttttttctcctgcatcatttatgcaggcgcgagccagttcgtcattaccgcgatgctggcagccgggagtagtttgtggattgctgcactgaccgtcatggcaatggatgttcgccatgtgttgtatggcccgagtctgcgtagccgtattattcagcgtctgcaaaaaagcaaaaccgccctgtgggcgtttggcctgacggatgaggtttttgccgccgcaaccgcaaaactggtacgcaataatcgccgctggagcgagaactggatgatcggcattgccttcagtagttggagtagctgggtatttggtacggtaataggggcattctccggcagcggcttgctgcaaggttatcccgccgttgaagctgcattaggttttatgcttccggcactctttatgagtttcctgctcgcctctttccagcgcaaacaatctctttgcgttaccgcagcgttagttggtgcccttgcaggcgtaacgctattttctattcccgtcgccattctggcaggcattgtctgtggctgcctcactgcgttaatccaggcattctggcaaggagcgcccgatgagctatgaggttctgctgcttgggttactagttggcgtggcgaattattgcttccgctatttgccgctgcgcctgcgtgtgggtaatgcccgcccaaccaaacgtggcgcggtaggtattttgctcgacaccattggcatcgccagcatatgcgctctgctggttgtctctaccgcaccagaagtgatgcacgatacacgccgtttcgtgcccacgctggtcggcttcgcggtactgggtgccagtttctataaaacacgcagcattatcatcccaacactgcttagtgcgctggcctatgggctcgcctggaaagtgatggcgattatataacccacaagaatcatttttctaaaacaatacatttactttatttgtcactgtcgttactatatcggctgaaattaatgaggtcatacccaaatggatagtagctttacgcccattgaacaaatgctaaaatttcgcgccagccgccacgaagattttccttatcaggagatccttctgactcgtctttgcatgcacatgcaaagcaagctgctggagaaccgcaataaaatgctgaaggctcaggggattaacgagacgttgtttatggcgttgattacgctggagtctcaggaaaaccacagtattcagccttctgaattaagttgtgctcttggaagttcccgtaccaacgcgacgcgtattgccgatgaactggaaaaacgcggttggatcgaacgtcgtgaaagcgataacgatcgccgctgcctgcatctgcaattaacggaaaaaggtcacgagtttttgcgcgaggttttaccaccgcagcataactgcctgcatcaactctggtccgcgctcagcacaacagaaaaagatcagctcgagcaaatcacccgcaaattgctctcccgtctcgaccagatggaacaagacggtgtggttctcgaagcgatgagctaacgcgtcatctcgctcaaaaatccagatttataaaagaaaaaatgactggccagcatcgcaacatgctggcctttttggcaagcaggtcggctcagccgatgagttaagaagatcgtggagaacaatatgagcgcaaatgcggagactcaaaccccgcagcaaccggtaaagaagagcggcaaacgtaagcgtctgctcctccttctcaccttgctctttataattattgccgtagcgatagggatttattggtttttggtactgcgtcacttcgaagaaaccgatgacgcatacgtggcagggaatcaaattcaaattatgtctcaggtgtctggcagcgtgacgaaagtctgggccgataacaccgattttgtaaaagaaggcgacgtgctggtcactctcgacccgacagatgctcgccaggcgtttgaaaaagccaaaactgcactggcttccagcgttcgccaaacccaccagctgatgattaacagcaagcagttgcaggcgaatattgaggtgcagaaaatcgccctcgcgaaagcacaaagcgactacaaccgccgtgtgccgctgggcaatgccaacctgattggtcgcgaagagctgcaacacgcccgcgacgccgtcaccagtgcccaggcgcaactggacgtcgcgattcaacaatacaatgccaatcaggcgatgattctggggactaaactggaagatcagccagccgtgcaacaggctgccaccgaagtacgtaacgcctggctggcgctggagcgtactcgtattatcagtccgatgaccggttatgtctcccgccgcgcggtacagcctggggcgcaaattagcccaacgacgccgctgatggcggtcgttccagccaccaatatgtgggtggatgccaactttaaagagacgcagattgccaatatgcgtatcggtcagccggtcactatcaccacggatatttacggcgatgatgtgaaatacaccggtaaagtggttggtctggatatgggcacaggtagcgcgttcagtctgcttccagcgcaaaatgcgaccggtaactggatcaaagtcgttcagcgtctgcctgtgcgtatcgaactggaccagaaacagctggagcaatatccgctgcgtatcggtttgtccacgctggtgagcgtcaataccactaaccgtgacggtcaggtactggcaaataaagtacgttccactccggtagcggtaagcaccgcgcgtgaaatcagcctggcacctgtcaataaactgatcgacgatatcgtaaaagctaacgctggctaatccagaggtgcgtgtgatgcaacagcaaaaaccgctggaaggcgcgcaactggtcattatgacgattgcgctgagtctggcgacattcatgcaggtgctggactccaccattgctaacgtggcgatccccactatcgccgggaatctgggcagtagcctcagccagggaacgtgggtaatcacttctttcggggtggcgaatgccatcagcatcccgcttaccggctggctggcaaagcgcgtcggggaagtgaaactgttcctttggtccaccatcgcctttgctattgcgagctgggcgtgtggtgtctccagcagcctgaatatgctgatcttcttccgcgtgattcaggggattgtcgccgggccgttgatcccgcttagccaaagtctattgctgaataactacccgccagccaaacgcagcatcgcgctggcgttgtggagcatgacggtgattgtcgcgccaatttgcggcccgatcctcggcggttatatcagcgataattaccactggggctggatattcttcatcaacgtgccgattggcgtggcggtggtgttgatgacactgcaaactctgcgcggacgtgaaacccgcaccgaacggcggcggattgatgccgtggggctggcactgctggttattggtatcggcagcctgcagattatgctcgaccgcggtaaagagctggactggtttagtagtcaggaaattatcatccttaccgtggtggcggtggtggctatctgcttcctgattgtctgggagctgaccgacgataacccgatagtcgatctgagcttgtttaagagccgcaacttcaccatcggctgcttgtgtatcagcctcgcgtatatgctctacttcggcgctattgttctgctgccgcagttgttgcaggaggtctacggttacacggcgacctgggcaggtttggcctctgcgccggtagggattattccggtgatcctgagcccgattatcggccgcttcgcgcataaactggatatgcggcggctggtaaccttcagctttattatgtatgccgtctgcttctactggcgtgcctatacctttgaaccaggtatggattttggcgcgagcgcctggccgcagtttatccaggggtttgcggtggcctgcttctttatgccgctgaccaccattacgctgtctggtttgccaccggaacgactggcggcggcaagcagcctctctaactttacgcgaacgctggcggggtctatcggcacgagcataaccacgaccatgtggaccaaccgcgagagcatgcaccatgcgcagttgactgagagcgtaaacccgttcaacccgaatgcccaggcgatgtacagtcaactggaagggcttgggatgacgcaacagcaggcaagtggctggattgcccagcagatcaccaatcaggggctgattatttccgccaatgagatcttctggatgagtgccgggatattcctcgtcctgctggggctggtgtggtttgctaaaccgccatttggcgcaggtggcggcggaggcggtgcgcactaagtacaactaagccagttcatttgaactggcttttttcaattaattgtgaagatagtttactgattagatgtgcagttcctgcaacttctctttcggcagtgccagttcttcgttgctgttgatgcgtacgtcacgttccagaatgctacgcgcaatatcctgcgcttcctgcaagctgtgcatctggtaagtgccacactggtagacgttcagttccgggatctgattctgatcctgcactttcagcacgtcttccattgccgttttccaggcatcagcaacacgctgctcatctggcgtaccaatcagactcatataaaaaccggtgcggcagcccattgggctgatatcgataatctctacaccattaccgttaagatggttacgcataaaaccagcaaacaggtgctccagggtatggatccctctttctggcatcacttctttgttcggcacgcagaagcgcagatcgaacacggtgattgcgtcgccatgcggggtgttcattgttttcgccacccgaactgcaggcgcttccatccgggtatgatcgactgtgaagctatctaacaacggcatttagccacctccggtaatttttttaaaaattttctgaactctttcttcccaggcgagtctgagtatatgaaagacgcgcatttgttatcatcatccctgaattcagagatgaaattttggccactcacgagtggcctttttcttttctgtcaggcgtgtttttccagccacaccgcaaacggttcggtatcagcggcttccatttcctgctgacggcgttcagacgcctcgcgctcggctacaaaatcctcttcgcgcagaatttccagcggctcttcacgcagcagattacggtaggcttctgcaaatgctttgcctgttccgccaataccagtatcaatcatagaccttaagatacgggcagagaaagtcagatcgggattatcgaagcaggcaaccagttcatcacacactttctgatacgcttcgccgccgttaatactatccagcgtttgcgcgacgcgtttcagatcgcggaacagatctttacccacctgcggtaacgggaactgtgcggtttcgcagccgatacccagcgtcagacccggtttgcgaccttcgaggatcacccggttccagttaacgcgtgtacaggcaagttcgctactgctcatttccggtgcatcagccagcgcacaccagaccataaacaggtcgaggaatcgcacctgctgttcatctacaccaatcgggctgaacgggttgatgtccaggctacgcacttcaatatattcaatgccgccacgtaacagcgcatcagaagggctctcgccgctgcgggtaacgcgttttggacgaatcggcgcgtacagttcgttttcaatctgcaacacgttgctgttgatttgcagcctcttaccgtctttctcaataccaatcttcgcgtactcttcgcttggcgttttgattgcctgtttaaggcccgctacgtactcgtaaagatcgttgaaggtaataccaagattgctttggcttttattggtatagccgagatcgctcaaacgaagagaggtcgcatacggcaggtaatacataccgcactcggttttctcaaacggcaggctcgttggttttccttgcaggaaagaagaacaaatcgccggagatgcaccaaacagataaggaatgacccaaccgaaacgatagtaattgcggataacgcggaaatagcccgcagaaattttctctttggcatcagcgccgctgatatcaccgcacttcgcttgccagaatgccattggcaaagagaaattgtagtgcacgccggaaatggtttgcatcagcgcgccgtagcgatttttcagcccttcacgatacagcgttttaaagcgtccggtgttagaagtgccgtactgtgccagttcgatgtcctgaccttctgcgatgtagcatggcatacttaacggccacatccgctcatcgcccatattgcgcgccgtataacgatgcagatcgcgcataaaggtcagcatatgttcaatatcaccatccactggtgtaatgaattccagcaatgcttccgcaaaatcggtagtaatccatttgtgcgtcagtgcggaacctaatgcttcaggatgacctgttgttgccagtgtgccatcagcattaacacgcaaagtttcgcgctccagcccacgctgtatcccctttaacgcctgaggatgtttttccagccaggccagcgcctgacttacgtccgggatcaaattgacctcccgcctgtcaaaatcgttttaattagcataactgtaatggtgaccatatgtgcaggcctacaattagtgccaccacatcatgccctgaacggtcgctgctgcaactgcaacatagcgtaacgctttaccaaggcacaaaaaaaagattaccggtccccagctgatgcgcatccatcccgctaacagacacagtaaatcgccaaccacgggcatccagcttaataatagcgtgactgcaccatagcgtttcagccagccggtagctttctcttgccagcggcttgttttacgcaatggaaagaaacgcccaaggataacgttagttaaccctccaaggctattacccattgttgctgttaaaactaaaacccagggatgactgatcccggaaagcaacattgccaccagcacgacttcggagttgccgggtaatagtgtagcgctgagaaaactactggcaaacaagctgaaaaggcttaacgcttcactcacagcaagcgaacatccacggcgtccatgcctgctgcacgggccgcctgaataccgaaatcggcatcttcaaagaccacacactgcgtcggttgcacgcccatacgctgcgcgcacaacaaaaatgtgtctggcgcgggtttatggtgtttgacgtgatcggcagcgacgacggcgtcaaaataatggcgtaatcccaggtgcgccagcaatgcctcagcgatggcgctttcactccccgttcctacagccattgggcgacgaccatgccaacttttcaccacatcaacaagaggaagcggttcgacgctatccagcagcatacttcttactgcttctgttttttcacgcgctaacgcatgcgggtcgagatcggcctgattcagctcaataattgcctgagcaatacgccaggtggggcttccattaagcgcaatcatcgcctgaatatcgtactgaagaccgtagtgccctaatacttcgcgccacgctttacggtgcgtaggctccgtatccaggattgtgccatccatatcaaaaattaaacctgcataacgctcgtacatggtcttctcgcaagtcgaaaaatatgacgctactttagcgtaattgcttgattttgtcgctgatggcgaaggagaagaaaattcaggaaatggataaaggagttatttagaaatgagatatttttgaaggaaattttttggagaagatggtgcatccgggaggatgactcactgacgttcgcccttcgggccgttgctggcgcaacgttatccttcctggtgcctgcggttaataccgctatctcttcgataccttcattgctgaaggttacggagaatatggtgcatccgggaggattcgaacctccgaccgctcggttcgtagccgagtactctatccagctgagctacggatgcatcgggaaaacttattctactgctgatattgataccgctactaaagccatatcaattaagagatggtgcatccgggaggattactcgccttgcggctcgcccttcgggccgttgctaaagcaacgttatcatccctagtgcctgcggttaattccgctacctcttcgataccttcattgctgaagatttcggagaatatggtgcatccgggaggattcgaacctccgaccgctcggttcgtagccgagtactctatccagctgagctacggatgcatcgggaaatttattttactgctgatattgataccgctactaaagccatatcaagtaagagatggtgcatccgggaggattcgaacctccgaccgctcggttcgtagccgagtactctatccagctgagctacggatgcatcgggaaacttactttactgcagattttttgataccgctactaaagccgtatcaagtaagagatggtgcatccgggaggattactcgccttgcggctcgcccttcgggccgttgctaaagcaacgttatcctccctggtgcctgcggttattaccgccacctcttccataccttcatcgctgaaagtacgtagaatatggtgcatccgggaggattcgaacctccgaccgctcggttcgtagccgagtactctatccagctgagctacggatgcaaatggcggtgaggcggggattcgaaccccggatgcagcttttgaccgcatactcccttagcaggggagcgccttcagcctctcggccacctcaccacacgcctcttacgagtgcttcgaagaacttgtttatcgctcatcgtcgctgcgtggcgcacatattactttctgagacttataagtcaaacaatttttcctacacttttatcgtttgcacacttcacgttcaattagtctgtaaaaacgtcaaaaagagtgttttatcaacagaagaatggaggtctgacagatagtagtaatgcaaaaaaatggagacttaagttgaatgaacgggagtaaagcgaaaagactatagagtgaaggagaaattttgagggtgcgtctcaccgataaagatgagacgcggaaagattagtaactggactgctgggatttttcagcctggatacgctggtagatctcttcacggtgaacagaaacttccttcggggcatttacgccaatacgtacctggttgccctttacccctaaaactgtcacggtgacctcatccccaatcatgagggtctcaccaactcgacgagtcagaatcagcattctttgctccttgaaagattaaaagagtcgggtctctctgtatcccggcattatccatcatataacgccaaaaagtaagcaatgacaaacacattacatctaagcagtcatggcattacattctgttaaacctaagtttagccgatatacacaacttcaacctgactttatcgttgtcgatagcgttaatgcgaatgccgtgaagcgagtccacggcattgcctgacgcttatattattgcaatttcgcgctgacccagcctttcacactggctaacgctgcaggtaaggccgcagcatccgtaccaccggcttgcgccatgtcaggacgtccaccacccttgccgcccacctgctgagcgaccataccaatcagttcccctgctttcacacgatctgtgacgtccttagatacgcctgcaatcagagaaaccttaccttcgactaccgttgccagcacgataattgtgctccccagctgattttttaaatcgtcaaccatggtacgcaacattttcggctcaacaccgctaagctcgctaaccaacagcttaacaccattaacatcaattgccttactggaaagatttgcgctctcctgtgcggcagcttgttctttaagctgttgtaactctttttccagctgacgcgtacgttccagtacactgcgcactttatcagccagattattgctatcgcctttcagcagatgcgcgacttcgcttaagcgatcgctgtctgcatgaacggtggcgatagcaccttctccggttaccgcttcgatacgacgaacgcctgcagcagtaccgctttcagagatgatgcggaacagaccaatatcaccagtgcggctggcgtgagtaccgccacacaactcggtagagaaatcgcccatgctcagcacgcgtacgcgctcatcatacttctcgccgaacagcgccatcgcacctttcgctttcgccgcttcgagatccatgatgttggtttcgatcggcaaattgcgacgaatctgtgtgttcaccaggtcttcgaccgcacgaatctcttctggtttcatcgcttcgttgtgactgaagtcgaagcgcagcaccttgtcgttaaccagactacctttctggcttacatgagtacccagaacctggcgcagcgcagcgtgcatcaggtgcgttgcggagtgattcagacgaatacgggcgcgacgagcctcatcaacatcagcctgcaccgcgtcgcccactttcagagaacccgcagcaagtttaccgatgtgaccaatcgcctggccgtatttctgcgtatcttccaccgcaaaggagaagttagcgcctttcagttcgcctttatcgccaacctgaccgccggattccgcatagaatggcgtttgatccagcacgaccacagcttcctggcctgcattgatggcatcaaccgctttaccatcaacaaacagcgcagtcactttgccgttcagttccagatggtcatagcctttaaattcagatgcactgtcaacacggatcattgcgttgtaatcggcaccaaagccgctggcttcgcgcgcgcgacgacgctgctcttccattgcagcttcaaaaccagcttcgtcaactttgatgttgcgctcacgacaaacatcagccgtcaggtcaaccgggaagccataggtgtcgtacagacggaaagcagtttcaccatccagcgtatcaccagaaagttttgccagctcttcatccagcaacgccagaccgcgctccagagtacgagcaaactgctcttcttcagtcttcagcacctgctcaacctgcgcctgctggcgtttcaggtcttcacccgcagagcccataacgtcgatcagcggaccaaccagtttgtagaagaaggtttctttcgcgccgagcatattaccgtgacgcactgcgcgacgaatgatacgacgcagtacataaccacggttttcattggacggcattacgccatccgcgatcaggaacgcacaagaacgaatgtggtcagcgattacgcgcaggcttttattgctcagatcggttgcgccagtgactttcgctaccgcctggatcagcgtgcggaacaggtcgatgtcatagttagagttaacgtgttgcagcaccgcagcaatacgctccagacccataccggtatctacagacggcttcggcagcggttccatcgtgccatcggcctggcggttgaactgcatgaagacgatgttccagatctcaatgtagcggtcgccgtcttcttccgggcttcccggagggcccccccaaatgtggtcgccgtgatcgtagaagatttcggtgcacgggccgcacggaccagtgtcacccatctgccagaagttgtcagatgcgtatggcgcacctttgttatcgccgatgcgaataatacgttcgcgcgggatccctacttctttttcccagatttcgtaggcttcgtcgtcgctttcatagacggtaacccacagacgctctttcggcagggcaaaccatttttcgctggtcagcagttcccatgcaaactgaatggcatcgtgtttgaaatagtcgccgaagctgaagttgcccagcatttcgaagaaggtatggtgacgcgcggtgtaaccgacgttttccaggtcgttgtgtttaccacccgcacgcacgcagcgttgggaagtggtagcgcgggaataattacgcttgtcgagcccaaggaacacatccttgaactggttcatcccggcgttggtaaacaacaaagttgggtcgttatggggtaccagggagctgctggcaactacctgatgtcccttactatggaaaaagtcgagaaacgcctgacggatctcagcggtgctcttgctcataattatcctgaaatcaagctaacgaaatatcgccaccagctccagcgtgtcttaaccgccgggctggtaactgaaaagtgggaataagataagttttcttgactgggaagtaaaataccgtatgcgttcagtcggcaaaatttcgccaaatctcctggatatcttccatcagatagccacgatagagcagaaaacgctggatcttaactttttcactaaagacagttggcaaaggttcgccatattttcgcgtcgcctgatcgcgcgccagtgcgcaccagtcgatgtcacattcacgcatcgctttttctgtcgcttcgcgggaaatacctttctgattcagttcctggcgaatacgcgcaggtccataacctttgcggctacggctggcgataaagcgcgcaacaaatcggctgtcatcgagatagccatgttcatggcaccaggcaataacgcgctcgtaatcttctgccgtagcatcaatctcttctgggccatttttgcccataatcggtgccgcgagtttacgtcgcagttcttgctcactgtgatcgcgcaccgccagaatgcgtaccgcacgatccaacaggcgagcatatgccgggcgacgggatgtactttctgtcatggcatatccttacaacttaaaaaagcaaaagggccgcagatgcgacccttgtgtatcaaacaagacgattaaaaatcttcgttagtttctgctacgccttcgctatcatctacagagaaatccggcgtactgttcgggttgctcagcagcaactcacgtactttcttctcgatctctttcgcggtttccgggttatctttcagccaggcagtcgcattcgctttaccctgaccgatcttctcacctttgtagctgtaccacgcgcctgctttctcgatcagcttctcttttacgcccaggtcaaccagttcgccgtagaagttgataccttcgccgtagaggatctggaattcagcctgtttaaacggcgcagcgattttgttcttcaccactttcacgcgggtttcgctacccaccacgttttcgccctctttcaccgcgccgatacgacggatgtcgagacgaacagaggcgtagaatttcagcgcgttaccaccggtagtggtttccgggttaccgaacatcacaccaattttcatacggatctggttgatgaagatcagcagcgtgttggactgcttcaggttacccgccagcttacgcatcgcctggctcatcatacgtgccgcaaggcccatgtgagagtcgccgatttcgccttcgatttccgctttcggcgtcagtgccgccacggagtcaacgacgataacgtctactgcgccagaacgcgccagggcgtcacagatttccagtgcctgctcgccggtgtccggctgggagcacagcaggttgtcgatatcgacgcccagtttacgtgcgtagattgggtccagcgcgtgttcagcatcgataaacgcacaggttttaccttcacgctgcgctgcggcgatcacctgcagcgtcagcgtggttttaccggaagattccggtccgtagatttcgacgatacggcccatcggcagaccacctgccccaagcgcgatatccagactaaggctaccggtagagatggtttccacatccatggaacggtcttcacccaggcgcatgatggagcctttaccaaattgtttctcaatctggcccagtgctgccgccaacgctttctgtttgttttcgtcgatagccatttttactcctgtcatgccgggtaataccggatagtcaatatgttctgttgaagcaattatactgtatgctcatacagtatcaagtgttttgtagaaattgttgccacaaggtctgcaatgcatacgcagtagcctgacgacgcaccgcatcacggtcgccgctgaagcattcccgccgggtaatgccttcaccgcgggcagtggcaaaagcaaaccagacggtgccgacaggcttctcttcactgccgccatccggcccggcgataccactaatagacacggcataatcagcacgagccgctttcagtgcgcctatcgccatttccaccacgacgggttcactcaccgcgccatgctgcgccagcgtctcttcgcgtacgccgatcatctgcgctttggcttcgttactgtaggtgacaaatccgcgttcaaaccaggcggagctaccggcaatatcggtaatcactttcgctacccaaccaccggtacaagactcggcagttgttacggttgcgccacgggctttcagcgcctgcccaacctgttcacttaactgcatcagttcactgtcagtcatcacaacctctgtcagtcaaaaatttatgccggacaagatagcactttcgtcaggaagatggtgttggcgttgcaattttacgaggaggattcagaaaaaagctgattagccagagggaagctcacgcccccctcttgtaaatagttactgtactcgcgccagcgccacggcttgtcctaactgccagaccgccattgcgtaatgggtgctgtggttgtaacgggtgatggtgtagaagttcggcagaccgtaccagtactggtagccggtgccaacatccagacgcagcaggctggcttgttgatggttgcccagcggctgctgtggcgttaaacctgcggcggcaagctggctaatgctgtacttagttttgaagccatttggcaagcctggagcctgaccgtttgccattaccgcgacctgatcgcctttcacccagccgtgcgctttgaaatagttcgccacgctaccgatcgcatcaaccggatcccacaggttgatatgcccgtcgccgctgaaatctaccgcatattgtttgtaagagctcggcataaactgtccgtagcccatcgccccggcaaaggaacctttcagattgagcggatcgtcctgctcgtcgcgcgccatcaacaggaaggtttccagctcgccagagaaatactccgcgcggcgtgggtagttaaaactcagcgttgccagcgcatcgaggatgcgagttttccccatcacgcgcccccagcgggtttcaacgccgataatcccgacgataatttccggcggtactccatacacctgccacgcgcgattcaacgcatcttcatactgattccagaaaaccacaccgttctgcacgttgtccggcgtaataaattttttgcgataacggagccatgcgccgttcggaccacttggcggtttcacgcttgtggttggtgcctggttatccatcagccgcagtacgctatccagacgcttcgcctgggagagaatttcctgcaactgctgacgatcgaaaccgtgtttgttcaccattttgtcgatgaactgctgggcattcgggttattagcgaaatcgccgcccatctgcatcacattgtgctgcggctcaagcaggaagccgccagacggcgttccggtggtcgtatcagtctcagtaggttttggcttgctgctacaggcggcaagcaacacaaaaaggggaagcaatgttacataacgacgcttgaacatgaggggtccatttaacagattcaaccaggggcaagtatggtaaagcatcacgccccgcacaaggaagcggtagtcactgcccgatacggactttacataactcaactcattcccctcgctatccttttattcaaactttcaaattaaaatatttatctttcattttgcgatcaaaataacacttttaaatctttcaatctgattagattaggttgccgtttggtaataaaacaataaatcctgaaggagagaacaatgatagaaaccattactcatggtgcagagtggtttatcgggctgttccaaaagggcggagaggtgtttaccgggatggtgaccggcattcttccgctgttgattagcctgctggttatcatgaacgcactgattaattttatcggtcagcatcgtattgaacgttttgctcaacgttgcgccggtaaccctgtttcccgttacctactgttaccgtgcattggcacgtttgtcttttgcaatccgatgaccctaagcctgggtcgctttatgccggaaaagtacaaacccagctactacgcggcggcctcttatagctgccacagtatgaatggcctcttcccccatatcaaccctggcgaactgtttgtttatcttggcattgccagcggtctgacaacgctgaacctgccacttggcccactggcggtgagttatctgctggttggtctggtcaccaatttcttccgcggctgggtgaccgatctgaccaccgccatttttgagaaaaagatgggcattcaacttgaacaaaaagttcacctggcaggagcaacaagttgaaataacacctggcaggagcaacatcatgacgcatattcggatcgaaaaaggaacgggtggctggggcggcccgcttgagctgaaagccacgccgggaaaaaaaatcgtctatatcaccgccggtacccggcctgcgattgttgacaaactggcacagcttactggctggcaggctattgacggatttaaagaaggtgaacccgcggaggtggaaattggtgtcgcggtaatcgactgtggcggcacattacgctgcggcatctatccgaaacgacgtattcccaccattaatatccacagcacgggcaagtccggtccgctggcgcagtacattgtggaagatatttatgtctctggcgtaaaagaagaaaacatcactgtagtaggtgatgcgacaccacaaccctcttccgtgggccgtgactatgacaccagtaagaaaatcaccgaacaaagcgatggtttactggcgaaggtgggaatgggcatggggtccaccgttgcggtgctgtttcaatctggtcgtgacaccatcgacactgtattaaaaaccattctgccgtttatggcattcgtcagcgcgctcattggcatcattatggcttctggccttggtgactggattgcccacggtcttgctccgctggcgagccatccactgggtctggtcatgctggcgctcatctgttccttcccactgcttagtcctttcctcggcccaggcgcagttatcgcacaggttatcggcgtattgattggcgtgcagattggtctcggcaatattccgccgcatctggctttaccggcactgtttgccatcaacgcgcaggcggcctgcgacttcatcccggtcggtttgagcctggcggaagcccgtcaggacacggttcgcgtcggtgtcccttctgtactggtgagccgctttttaaccggcgcgccgactgtactgatcgcctggtttgtctccggttttatctatcaataaaggctgaaacatgaccgttatttatcagaccaccatcacccgtatcggcgcgagtgccattgacgccctcagtgaccagatgctcatcacctttcgtgaaggcgcgcctgcggacctcgaagagtattgcttcattcattgccacggcgagttgaaaggtgcactccatcccggtttgcaatttagtctcgggcagcatcgctatccggtgaccgctgttggcagcgtggcggaagacaaccttcgcgaactgggtcatgtcaccctgcgcttcgatggtttaaacgaagcggaatttccgggcactgtccatgtggcaggccctgtccccgacgatatcgcgccgggaagcgttttgaagtttgaatctgttaaggagtaaaaaatgaatcaggttgccgttgtcatcggtggtgggcaaaccttaggcgcgttcctgtgccacggtctggctgccgaggggtatcgcgtcgcggttgtcgatattcagagcgacaaagccgcaaatgtggcacaagaaattaacgccgaatatggtgaaagtatggcgtacggttttggtgctgacgccactagcgagcaaagcgttctggcgctctctcgtggggtagatgaaatctttggtcgcgtggatttgctggtctacagcgccggaatagcaaaagcagcctttatcagcgacttccagctcggcgattttgaccgtagcctacaggtgaatctggtgggttatttcctgtgtgcgcgtgaatttagccgtttgatgatccgcgacgggattcaggggcgcattattcagatcaacagcaaatccggcaaagtgggcagcaaacacaactctggctacagcgcagcgaaatttggtggcgtcgggctgactcaaagtctggcgctggatctggcggagtacggcattacggtgcatagtctgatgctcggtaacctgctgaaaagcccgatgttccagagtctgttgccacaatacgcgaccaagctgggtatcaaaccggatcaagtcgagcagtattacatcgacaaagtaccgctcaaacgcggctgcgattatcaagatgtgctgaatatgctgctgttctacgccagtcctaaggcgagctactgcaccggacagagcatcaatgtcaccggcggtcaggtgatgttctgatcaacagcggagatccattaaggatctccgtgagactatagaatgcctgatgcgctacgctcatcaggcatacaggacttccgccactacattaaggaaaagttatggtatccgcactcatcaccgtcgccgttatcgcctggtgtgcgcaactggccttaggcggctggcaaatttctcgttttaaccgtgccttcgacacactatgccagcaagggcgggttggcgtgggccgttccagcgggcgctttaaaccgcgggtcgtggtcgccatcgcgctggacgatcagcagcgcatcgtcgacaccttgtttatgaaaggactgaccgtcttcgcccgaccgcaaaaaattcccgcaattaccggtatgcatgcgggtgatttacagcccgatgtgatctttccccatgatccactaagtcagaatgctctaagtttggcgcttaaactgaaacgtggataatttcgttgtgaatgttacttgcttgcgaagttatcattttgaaacctaaatcaggtaatcacgcccatgaaacctcgtcagcgtcaggccgccattctggagtatctgcaaaagcagggtaaatgcagcgttgaagaattggcgcaatactttgacaccacaggcacaaccattcgcaaagatctggtcattctggaacatgccggaaccgtcattcgtacttatggcggagtggtgttgaataaagaggaatccgatccgcctatcgatcataaaacactcatcaacacccacaagaaagagctgattgcagaagctgccgttagttttatccatgatggcgatagcatcattcttgatgctggcagtaccgttttgcagatggttcccctgctcagccgctttaataacatcacggtgatgaccaacagcctgcatatcgtcaatgcgctatccgaactggataacgaacaaactatcctgatgccaggcggaacgtttcgcaaaaaaagcgccagttttcacgggcaactggcagagaatgccttcgagcatttcaccttcgataaattgtttatgggcaccgacggcatcgatctcaatgcgggcgtaaccacctttaacgaggtttataccgtcagtaaggcaatgtgcaatgccgcgcgcgaagtgattttgatggcggacagtagtaagtttggccgtaaaagccccaacgtagtttgcagtcttgaaagcgtcgataagctgattaccgacgcaggtatcgatccggcgtttcgtcaggcgctggaagagaaagggatcgatgtgatcataaccggagagagcaatgagtgaagcactactgaacgcgggacgtcagacgttaatgctggagttgcaggaagcaagccgtttaccggaacgtctgggcgatgattttgttcgcgccgccaatatcatcctgcactgtgaaggcaaagtggtggttagcggaattggcaaaagcggccacattggtaagaaaatcgccgcaacgcttgccagtaccggcactccggctttttttgtccatccggcagaagcgctgcacggcgatctggggatgatcgaaagccgcgatgtgatgctgtttatctcttactccggtggcgcgaaggaactggatctgattattccgcgtctggaagataaatctatcgcgctgctggcgatgaccggcaaaccgacgagtccgctgggcctggcggcaaaagcggtgctggatatctccgtagaacgcgaagcctgcccgatgcaccttgcgccgacctccagcaccgtcaataccctgatgatgggtgacgcgctggcgatggcggtcatgcaggcgcgcggatttaatgaagaagattttgcccgctcccacccagccggggcactgggcgctcgcttgctgaataaagtgcatcatctgatgcgccgtgacgatgccatcccacaggtggcgttaaccgccagcgtgatggatgcgatgctggaactcagccgcaccggtctggggctggtggcggtatgtgacgctcaacaacaggtacaaggcgtctttaccgacggcgatttacgtcgctggctggttggcggcggcgcactcaccacgccagtcaatgaagcgatgacggtcggcggcaccacgttgcaaagccaaagtcgcgccatcgacgccaaagagatcctgatgaagcgcaaaatcactgccgcaccggtggtggatgaaaacggcaaactcaccggcgcaataaacctgcaggatttctatcaggccgggattatttaatccttcaatcccagacgtttcgccagccgatgcaggttggcgacgtcggtttccagcatccgcgcgcaggcagcccagttgtgatgattttgtgccagtgcctgacgaatagtttcacgctggaacgcttctgtcgcttcacgcaggttttgcttaacaacgggcaccgccgccacttctggcgtcggcaacgtcacctcaggaaaagcaaaatgttgcgcctcaagaatcacttcatcgccgctgcgggtggctctcgccagaactaccgcccgatgaatagcatgttccagttcgcgcacgtttcccggaaaactgtagtgttgcagtaaatttcgcgctccggcacttaataccacgcgggagagcccctgccgcaaacgacactgctcgcagaaataccccgccagcagaatgacatcatcgccccgctcacgcagcggcggcacgctaagtggaaacacgctcaggcgatgaaacaaatcggcgcggaatcgccctgccagcacctcttcgcgtaaatcgcggttagtcgccgccagcacgcgcacatcgacccgcaaacaacggtcatcgccaacgcgctgaatatcgccatactgcaacaccctcagcagcttggcctgcaatgccaagctcaactcgccgatctcatccagaaacagcgtgccgttatccgccatttcaaacttcccgctgcgattactgatagcgccagtaaacgctcctttcacatgcccgaacaactcactttccgccacactttccggcagtgcagcacagttgagatagaccagcggattcaccgcccgtgggctggcttcatgaatcgctttcgccaccagctccttaccggttccagtctcaccgctgatcaggacgttgagatcggacgccgccacaatctcaatctcttttttcagttgcgtcatgccaggggacaagccaatcatctgcgtctgtttcaccgcttcaaacggcgtggcatcgcctggcagcatattctggctttccagttgttcaatcagcaacgcattgcttaacgctcccgccgccagcgcagcaatcagccgtagctcttcgtcgctgaaaacatcgaactgatcgggctgcatcccgtcgagcgtcagtgcgccgatcaggttttgcccggcaaacaatggcagaccaacgcaggcgtgaaccttcagactctcctgcccaggaatcaaaccgtcatagggatcgggcaattcgctgtctgcgggaaagcgcaccacatccccggcgcgggcaatcgcttccagccgtggatgcccttccagcgcaaagcgtctaccgagtacatcctttgccagaccgtcgatggcaagcggaataaactgccggctatcgtaacgtagcaacgcagacgcatcgcactccagcacctgacgtagcgtggtgatcaggcgctgaaaacgatcctggtgaccaatcccacgctgcaattcgatggcgatattcgccagcacatcaacggaaaaactcatctttgcctcactgtcaatttgactatagatattgtcatatcgaccatttgattgatagtcattttgactactcattaatgggcataattttatttatagagtaaaaacaatcagataaaaaactggcacgcaatctgcaattagcaagacatctttttagaacacgctgaataaattgaggttgctatgtctattgtggtgaaaaataacattcattgggttggtcaacgtgactgggaagtgcgtgattttcacggcacggaatataaaacgctgcgcggcagcagctacaatagctacctcatccgcgaagaaaaaaacgtgctgatcgacaccgtcgaccataaattcagccgcgaatttgtgcagaacctgcgtaatgaaatcgatctggcggatatcgattacatcgtgattaaccatgcagaagaggaccacgctggggcgctgaccgaactgatggcacaaattcccgatacgccgatctactgtacagccaacgctatcgacagcataaatggtcatcaccatcatccggagtggaattttaatgtggtgaaaactggcgacacgctggatatcggcaacggcaaacagctcatttttgtcgaaacaccaatgctgcactggccggacagcatgatgacttacctgacaggcgacgcggtgctgttcagtaacgatgctttcggtcaacactactgcgacgagcatctgttcaacgatgaagtggatcagacggagcttttcgagcagtgccagcgttactacgccaatatcctgacgccgttcagccgcctggtaacaccgaaaattaccgagatcctgggctttaacttaccagtcgatatgatagccacttcccacggcgtggtatggcgcgataacccgacgcaaattgtcgagctgtacctgaaatgggcggctgattatcaggaagacagaatcaccattttctacgacaccatgagcaataacacccgcatgatggctgacgctatcgcccaggggattgcggaaaccgacccacgcgtggcggtgaaaattttcaacgtcgcccgaagcgataaaaacgaaatcctgactaatgtcttccgcagtaaaggcgtgctggtcggcactagcacgatgaataacgtgatgatgccgaaaatcgccgggctggtggaggagatgactggtttacgcttccgtaacaaacgcgccagtgctttcggctctcacggctggagcggcggtgcggtggatcgtctttccacgcgcctgcaggatgcgggtttcgaaatgagccttagcctgaaagcgaaatggcgaccagaccaggacgctctgaagttatgccgtgaacacggtcgcgaaatcgcccgtcagtgggcgctcgcgccgctgccgcagagcacggtgaatacggtagttaaagaagaaacctctgccaccacgacggctgacctcggcccacggatgcagtgcagcgtctgccagtggatttacgatccggcaaaaggcgagccaatgcaggacgttgcgccaggaacgccgtggagtgaagtcccggataacttcctctgcccggaatgctccctcggcaaagacgtctttgaagaactggcaagcgaggcaaaatgagtaacggcattgtgatcatcggtagcggcttcgccgcccgccaactggtgaaaaatattcgcaaacaggacgccactattccattaaccctgattgccgccgacagcatggatgagtacaacaaacctgacctcagccatgttatcagtcaggggcaacgtgccgatgaccttacccgccagacggcgggtgaatttgccgagcagtttaatctgcacctgtttccacaaacctgggtgacggatatcgatgccgaagcccgtgtggtgaaaagccagaataatcagtggcaatacgacaagctagtactggcaaccggtgccagtgcctttgtcccgcctgtgcctgggcgtgagttaatgctgacgttaaatagtcagcaagagtatcgcgcctgtgaaacgcaactgcgggatgcccgacgcgtgttgattgttggcggtggtttgattggtagcgaactggcgatggatttttgtcgtgcaggcaaagcggtcacgctaatcgacaacgctgccagtattctggcgagcttaatgccaccggaagtaagcagccgcttgcagcatcggttgacggagatgggcgttcatctgctgttgaaatctcagttacaggggctggaaaaaacggattctggcattcaggcaacgctggaccgccagcgcaatatcgaagtggatgcggtaattgccgccaccggactgcgcccggaaaccgccctggcacgacgcgccgggctgacgattaatcgcggcgtttgcgtcgatagttatctgcaaaccagtaataccgatatttacgcgctgggcgattgcgcggaaattaacggtcaggtattgccgttcctccagccgattcaacttagcgcgatggtgctggcaaaaaatcttctcggcaataacacgccgctgaaactcccggcgatgctggtgaaaatcaaaacgccggaattaccgctgcatctggcaggcgaaacccagcgtcaggatttacgctggcaaattaataccgaacgccagggaatggtggcgcgcggcgttgacgatgctgaccagcttcgcgcctttgtggtcagtgaggatcggatgaaagaggcatttggattgttgaaaacattgccgatgtaagtgggctactgtgcctaaaatgtcggatgcgacgctggcgcgtcttatccgacctacggggacgcatgtgtaggccggataaggcgtttacgccgcatccggcaatggtgtccaaatgcaacacgttttatccgttctggacttcacccgctaaccaacgcgccgcagcaataaccccctgccccagagacaaaccgccatcacccgccggtaaactctgtggaaagagcaatgtgaaatcagcgagataatgcgccagacgtgcacgcagcaaacggttatgaataaccccgccgctaaataccagcgtagtgataccacgcatcgtggcctgctcacgcatcaacgcggcaaaaccctgcgccagcgtatcatgaaacgcccacgcgcgttgattaaccggtgcctgccagttcagccactgctgccagaaagtggcgagatccagttgattgtccacccgcggcattgtcaccggatgcgtcactccgtggcaactggctgcgagcgcctccagagcacaagccgcttcaccttcataacttaacgtggctggcgcacagcccagtgccgccgccactgcatcgaaaaaacgcccacagctactcgccagcggcgcgttaattccacgctcaatggcccgcgccagcacgctccagttttgctgttgcacacttgctgtttcagagtaattctgccactccggcacaaagcgcaggcactgcgccagcaggtttcgccacggctgcttcgctgccaaatcgccacccggaagcgccactgcaggcaagccgcccaggtgctcacattcgcgatagttcacccgcaggcactcgccgccccacaaagcgccgttctcccccataccgataccgtcgagcgtcaaagcaatgacatcaccgccatccagcggccactgatgctctgccagacacgccgctgcatgggcatgatgatgcagtaccgtttgcgtcggcagattcatttcacgcgcccactggctggagacatagcccggatgcgcgtcatgcacaacgtattgcggggtaaaatcgtagatgttttgcatcaggcgtaacgcttcgcgccactgcatctggatgccatcgtcacttaaatcgcccagatgctgactcaacaccgcttgttcaccgcgcaccaggcagaaggtatttttcagatccgcgccgagacacagcacaggcggaacatttttaaagcccggaggcaaagccagcgcatccggcacatacccccggctacggcgcagcatttcgccgctttcgcgcaccacgctatcatccatccgctgcacgatgtcgcggttatgtatcaagaatccgtcggcaatgccctgcaaatccgccagcgcctgttcgttgctgatagctggtggtttaccgctcaggttgccggaggtcatcaccagcgggcattgcagttcctgtaacagcaaatgctggagcgggttcgcaggcaacattaccccgacttcgttaaggtcaggggcgatatcatcacaaagctcaggaacgtattttttatccaccagcacaatcggcgcggcgggcgtggtaagcaactggcgcgcagcgtctggtaaaccgtcagccactggcaacatgaccgccagcggtttcgccgggcgatgtttgcgcgcccgaagtgtcgccaccgcgttactgttacgtgcatcgcaggcaagatgaaatccgccaatccctttgatggcgacaattttgcccatttttaactgtgcgatagctgcctgtaatgccgcctcttgttccgcatgttcaccatgacttacccattcaagatgcgggccacactccgggcaggccaccggctgggcgtggaagcgacgatcgagcgggtcacggtactctttgtcacaggccggacatagcggaaacgccgccatcacggtaaacgggcggtcgtaaggcatggcgcgaataatggtgaaacgcgggccgcagtgggtacagttgataaacggataacgataacgccgttcgcctggggtattcatttcggcaaggcaagcagggcaagtagcggcatcgggaacaatttgcgtattcatggtgccgcctgtgctctggcgtatagtgaactcggtgggcagttgactccagataaacggctcacgctcgacgctatcaatacgcgccagcggcgggcagtgctgatacaattgaacaagaaacgtttccgggtcttcccgcagccggacttctacgccatcgccgtcattacagacatcgccgtgaagatttaattgctgtgccagctgccagacaaacggacgaaaaccgacgccctgcactttgccacgaatacgcagttggacaccgcaagatgtgttttttgccattgagttattcccgccatcatgaattgcgtaacccgccctgccggacacgacagcgtcgcatccggcagtcacaggtcggcgataccgcccgctccgtattctacgaatatttccgggaattcctttgatgccagaacagttctgtaagatttttagaacatcagcgccgtacggcggcgtttttctgcgctcagttgttcaagtttattacgatcgacacaaatcagcgcatgagtcgggcaagccgccatacacgccgggccgtcttcacgatggttgcacaggtcgcatttattggcttcggctttgtcagcccgtacattcagacccgcgccgctgttgcggatcaccggacgtaccaccacttccatcgcaccatacgggcaagccacaacgcaggttttgcaaccaatgcaacgttcctgcatcacatgaacaaaccctttatcacggctgatagcaccattcgggcagacgttagcgcacggtgcatcttcacactgacggcaaactgtcgccgtggaaatgttcacacctttaatgacatggatacgcggtaaaaaagtttccggggtcaggcttgcacagtcctgattttcctgatgagaaaccacgcacgctacttcacaggtacggcaaccaatacatttactcgcgtcagcaatgatgaaacggttcatcaaattctccagcaatgacagttaatgcgccgatacattcacaaatcatgccagtttttaatttactgttatttaaggaaattaatttctgtaatgcaggaaaaacgatgtcatcgacactagtgacgatgacatgtgatgacaatgtttatcggctaggagcaatgagactgtcgcggcggatcagttttccgctgaaggttttcggcggactgaaatccccgccatcgagcataaaaatcagccgtccaataatttcctgaatcatctcagtcaccggaatttttacgctggagagcgccggaacggtgtagggggcaatagcgatatcatcgaatccgataacactcacctgctctggcaccgctacgccgcgctcgtgtaacgctttcatcgcacctatcgccatatcgtcgttactggcaactaacgcgctaaatttagccccacgttcgagcaacatttctaccccttcggccccgctggcaggcgtccatttaccgttagcgataagtttttcattgagcgcaataccatgctgcgccagcgcgtctttatacccggcaagacgttcaatgttggtgggggaatccatgctgccggtaaggaaagcaatctcctgatgcccggcgtttatcaactctgccacggcgttaaaactggtctgtttatgatcgcaccagacgctatggctgctgtttttgcgcaggcggcgattaagcaccattatcggctgactgtgcgcgtcaatgatgtcatcgatctcatccacgcttaaaaaacgcgggtaaatcatgatcgcgtcgcagcgcagatccagcagatactgaatcgcctggcgctcttcttctgcgctgtgtttaccatctgccaatagcaactgccgccctttctcttccgccattcgcgcggcatgaaagagtaattcactaaaataaatgccgtggtaaagcgtgttggtcactaccagccccagcgtctgagtactcttcgcgctcagattgcgcgccagcaagtttggacggtaaccgctctcttctaccgcctgaaacacgcgatctttagtctcctggctgacgtagccattaccactaagcacgcgggaaacggtcgctttactaaccccggcgcgcttcgccacttccagcatcgtcgtcatcattttcatccctttacacgcaatcaacgcagtgtactgcaccgtttgccgattgtccttgcacaatcggcgggaaaaatattcaggtgaccggtttcacaaatataaaaaatgaacaattcactctcttgcttatttagtgacaactattcatgattttgtgaaaccggtttcttaattccgtttcagcatcggcatttttccgtcacgtcgactgataacaactacatctaccctactgataacaggataaaatccgatggccaaaaattatgcggcgctggcacgcagcgtgatagcggcactgggcggcgttgataacatcagcgcggtcacgcactgtatgacgcggttgcgctttgttatcaaagatgatgcacttatcgacagcccgacgttaaaaaccatccccggcgtgctcggcgtggtacgtagtgacaaccagtgtcaggtgattatcggcaataccgttagtcaagcctttcaggaagtcgtcagcctgctgccgggagatatgcagcccgcacagcccgtgggtaaacccaaactcacgctacgtcgcattggtgcggggatcctcgatgcgctgatcggcaccatgagtccgctgatcccggcgattatcggcggaagcatggtcaaactgctggcaatgatcctcgagatgagcggcgtgctgacaaaaggaagcccgaccttaaccattctgaatgtgattggtgacggtgctttcttcttcctgccgctgatggtcgcggcatctgccgccatcaaatttaaaaccaatatgagcctggcgattgccatcgcgggtgtgctggtacatccgagttttattgaactgatggcgaaagcggcccagggtgaacatgtcgaatttgccctgattccggtcaccgcggtgaaatacacctacacggtgatcccggcgctggtgatgacctggtgcctgagttatatcgaacgctgggtggacagcattacaccggcggtgaccaaaaacttcctcaaaccaatgctgattgtgttgattgccgcaccgctggcaatcctgctgattggcccgattggtatctggatcggtagcgccattagcgcgctggtttacaccattcatggttatctgggctggcttagtgtcgccattatgggcgcgctgtggcctctgctggtaatgaccgggatgcaccgcgtctttacgccaaccatcattcagaccattgccgaaaccggcaaagaagggatggtcatgccgagtgagatcggcgctaacctgagcctgggcggtagtagtctggcagtggcgtggaaaacgaaaaacccggaactgcgtcagacggcgctggctgcggcggcaagtgccattatggcggggatttccgaaccggcgttatatggcgtggcgatccgcctgaaacgtccgcttatcgccagtcttatcagcggttttatttgcggcgcggttgccggtatggcggggcttgccagccacagtatggcagcgccggggctatttaccagcgtgcagttcttcgatccggcgaatccaatgagcatcgtctgggtgttcgcggtcatggcgctggcggtggtgctgagctttatcctcacactgttgctcggctttgaggatattcctgttgaggaagcggctgcccaggcgcgaaagtatcagagcgtacaaccgaccgtcgccaaagaagtaagtcttaattgaggatgaaaatgagtgtatttccagaaagttttttatggggcggcgcgcttgccgccaaccagtctgaaggtgcgttccgtgaaggtgacaaaggtctgaccactgtcgatatgatcccacacggcgagcatcgaatggcggtgaaactggggctggaaaaacgttttcagttgcgagatgacgagttttatcccagccatgaggcgacggatttttatcatcgttataaagaagatatcgccctgatggcagagatgggattcaaggttttccgtaccagtattgcctggagccgtctctttccgcagggcgatgaaatcacgcccaatcagcagggcattgctttttatcgttctgtctttgaagagtgtaaaaagtacggtatcgaaccgctggtcacgttgtgccacttcgatgtgccgatgcatctggtcaccgaatatggctcctggcgtaaccgcaagctggtggagtttttcagccgctacgccagaacctgctttgaagcatttgatggtctggtgaaatactggctaaccttcaatgaaatcaacattatgttgcatagcccgttctccggcgcgggtctggtgtttgaagaaggtgaaaatcaggatcaggtgaaatatcaggccgcgcatcaccagctggttgccagtgcgctagccaccaaaatcgcccatgaggttaacccgcaaaatcaggtgggctgtatgctggcgggcggtaacttctacccttacagttgcaagccggaagatgtctgggcggcgctggagaaagaccgggaaaacctgttttttatcgatgtgcaggcgcggggcacgtatccggcttactctgcccgcgtattccgcgaaaaaggggtaaccatcaacaaagcaccgggcgatgatgaaatcctgaaaaacaccgtcgattttgtctctttcagctattacgccagccgctgcgccagcgcggagatgaacgccaacaacagcagtgcggcgaacgtggtgaaaagcctgcgtaatccgtatctacaggtgagcgactggggctggggaattgatccactcggtctgcgtatcaccatgaatatgatgtacgatcgttatcagaagccgctgtttctggtggaaaacggcctgggcgcaaaagatgaatttgctgccaatggcgagattaacgacgactatcgcatcagctacttacgcgaacatatccgcgcaatgggcgaagcgattgcagacggcattccgctgatgggctacaccacatggggctgtattgatttagtttccgcctctacgggtgaaatgagcaaacgctacggctttgtctttgttgaccgtgacgacgcaggcaacggtacgctgacgcgcacgcgtaagaaaagtttctggtggtataaaaaagtgattgccagtaatggggaagatttagagtaagtaacagtgccggatgcggcgtgaacgccttatccggcctacatgtcgcacgaaccatgaaggcccgataagcgcagcgcatcgggcaatttagcatttggcatcagagctggttcaccccatcaagaacatccctgtcctgattccttaatgaaaaattactcttcttccaccgctaactgcgcgaagccgccatttccttcccagccttccagtcgttgataaacggtttctaccgcatctttaatcggctgggtcatcgggtagtaaaagccgacgatatccggctgaatgccgaggaaaatcacttcgccaatatcttctttcaactggtcgataaggtaattcaacggcatgttatgggtagtcatcataaacatctcggcgatatcatccgggtcgatgatgcggatctcgccggggtttagccccatatccgtggcgtcgacaatcagcagtcgtgtcgggcgcagttcacggatagcgacgatgtcgttttccggtgcgctaccgccgtcaatcaccacccagttacctttcggcgcggcggcgcacttttccgccagcagcggacctgcgccatcatcgcccatcatgctattgccaacacagagtaaaacgtcagtcacgcagtctcctcaccatcaaatagatggcgttttcctgatgaatatcatgcagcatacttaacagcattgtactccattcctgctgctggctagtttgcgctgcccgggctttatcgaatgcgttggccagcatcggcacatggttaatgtcgatgacgatctcaccatatttcggcacgccttccattttgcggcgggcttcactgcctgcctccagagtggcaatccatgccagatattcatcccacgggcaggtgagcgccgcttccaggcaatcgataaccccaaggtggtgaccaatcgccaggctgtaatagaccacctgctgcgcctcggcgggcgtggcatcgttctcatcaataaatttatggctcagttgactgaacaccaccttttcactcatcggatacgcgcctcttcaacaacatgattcagatggctgacaatctcgttcagacgcggatcgttttccgcttccagccagcgtgcaacctgttcttcgccctgccctaactgtgtaaggtaatcatcggcaatctgacgaccgtaacgataacccgccaggcgacgtgcttcgcgatccactttcacgcgcagcggctgcaccatatcaccatgcaggatctccgccggttgttcatccagttcacccggcccacgggcgtgaattttctgctccagcaggccgagcgccattgcaaagccgtacagcgtggcggcaggcgttggcgggcagccagggatataaacatccacagggacaattttatccgtaccgccccacacgcagtagagatcgtggaagatcccgccactgttaccgcaggcaccgtaggagatacaaattttcgggtccggcgcggactgccacgcacgcagcgcaggggatcgcattgcacgggtgaccgcgccggtaaacagtaaaatatccgcatgacgcggactaggaacgactttaatgccgaagcgttctgcatcaaacagcgggctaagcgtggcgaaaatttcgatttcgcaaccgttgcagccgccgcagtccacgcggtaaacataggcagaacgtttgatttttttcagtaagctcgccttcatgctggcgatggattcatccaccgtcatggggaccggaatgccgttggcgtcacgggggcctaataaattgctcatcagatggcctctttcatatggcgagtcagttcaatacggtcggacggcaccaggcatttctggcgcttacattccgggcaagtctcaaagctttcgcggtggttttccgcgcggctgtcgccgttgtgcttaagcagcgcaatggcgtagtcgatctctttctggacggcgaaaggacgattgcagacgcggcagttgcacagcgcgaagcgggactgttgcaggaagtcttctttcttccacaccgccagttcgtactcttggctcagtttgatcgccgccgtcgggcagacttcttcgcagcgtccacagaagatgcagtgcccaagattaaactcccaggcaagctctcctgtggcgaggtcagtttcaaccgttaaggcgttactcgggcaggcattgacgcaggccgcgcagccgatgcactgctgcgggttctgctctggcttaccacggaagtttttatcaaccgcaatcggctccagcggataagagctggtcgccgtgccggttttgatgacttttttgataaaggtaaacatggcgattccttatttcagcgggctgtttttacgctcaatgctgtaacgctcgagttctttgtacggcaccactttgctcttcttcttacgcacatcgaccacggtcatgcggtcggtacaggagtagcaagggtcgaggctaccgataatcagcggcgcatcggaaacggtgttgccgcgcagcatgtagcgcagggtcggccagttcgcgtaggtcgcggcacggcagcgccagcggtacagcttctggttgtcgccggtcatgctccagtggatatcatcgccgcgcggcgcttcggcaaagcccagcgcaaagcggtgcggaatgtaggtaaagccttccaccatcagtgggccacccggcaggttatccagaccgtagtcgatcatgttcagcgcggtatagacttcgttgatacgcactttcagacgggaaataacgtcgcagccctgctcgctgtggacttccattggcagcaggccatagccgacaaacgggtgatcggcgcgggtatcacgggcgtgaccgctggcacggaccatcgggccgacgttactgaagtcgcgagcgatttccgggtccagacgaccaatgccgacagtgcgctgttccatgttcggagtgctcagcagcacatccaccagctcctgcacttcacgacgcatctgttgtgccagctggcgggtctggatcatgtcgtctttcagcagatcgcgacgaatcccgccgatcaagttcaggccgtaggttttacgcgcaccggtaaggatctctgccattttcatggaggtttcacgcacgcggaagaactgcataaagccggagtcgaagccggtaaagtgacaggccaggccaaggttgagcagatggctgtgcaagcgttctacctccagcagaatggcgcggatcatctgcgcacgttctggcacctgaatacccatcgcgttttccacgctcgtggtgtaggcggtgctgtgggcaaagccgcagatcccgcacacacggtcagagaggaaggtcacttcgttataacccatacgggtttccgccagtttttccatgccgcgatggacgtagaacagacggtagtcggcgtcgataatgttttcgccatcgacgaacagacggaagtggcccggttcatcagaagtgacgtgcagcggaccaatcggcacgacgttgtttttcttgtcgcccagttcgttgatgaactcgtaggtttcagcatcggtggtcggtgccggacgctgacgataatccatgctgtctttacgcagcggataaagttcatccggccagtcatccggcagcaccagacgacgttcatccggcagaccaaccggaatcaaaccgtacatatcgcgcacttcacgctcgccccacaccgccgccggaacgcgcggcgtcacggacggatattccggtttgttggcgtcaacttcgacgcgaaccgtaatccaacacttagtgcccttctccatgctcagcacgtagtaaacggcgtaatgaccattcagtttgcgttcgtcgttaccaaacagcacgctcagccagccaccctgtttgtagtaaagaaactccaccacttccggcaggtagttcacctttacggtgacagtcagctgatctttggtctgccaggcgtggtccagcacgacgcccggaaatgcctcattcagcgcggcgagataatgttgacctaatttttcttcagacatgctcaaactctctttaatcacgccgccagcaaggagacgaacgctaaaaatgcaaagccaaacccagcccaggtaatgcgcggagtaatatcaagacgcagacgggccatgctgttttcgaacagcgcgataaccaggacgccgaccaccagttttacgatggcaatcaccagcgccagcagcagtccaccggcggtgaaggtttccatttgtccccacggaataaacaccccgacgaacatctgcaacaccaccagctgtttcaggctgataccccatttcatgacgccaaagccgctgccgctgtattcagagagcgggccttcctgcagctcctgctcggcttccgccaggtcgaacggcagtttgcccatttcgataaaggtggcgaacgcacaggcacaaagcgccagtaccagcgggatgctctggctcagcggccagtgataaacggtgtcggtgatgttgctgatgttggtggaaccggcaacctgtgcggcaacccacagaccaagcagcagcatcggttcgaccagcacgccaagcatcgcttcacggctcgcgccgatagcggtaaacgggctaccggtatccagaccagaaatggcaaagaagaaacgcgcgatggcaaagagatacagtaaggtgatcaaatcacccagttgcggcagcggagaaccgacggtcaccaccggcagcgcagtagcgatagtcagcatgacgcccaccatcacatacggcgtcaggcggaacacccagccggaggcatccgggccgacgctctgacgccccagcagtttgataatgtcgcgatactcctgcaacacgcccggcccgcgacggttatgcaagcgggcgcgcgccacgcgggttataccggagagcagcggcgcaacggcaaataacaccagcgcctgaattaacggatataaaacactcattctcaggctcctcgactaacaataatcaccaccagtaccgccagttcaaccagcgccatccggcggaacagcaacgcactcccctcgcactgccagcccggcaccagagacaccggattcagccatttgcgtagtttcagcaccggcgcaaacgcctgtttcaccggcatggcaaaaccgtgagcggtaatcaccatacttttttcgtggtcgtaaccgcacacccaggccgcaccgcgggaacggcttggcaaacgatcgcctttgcaaatcgccataatgatgaatggcagcagcgggcaggcaatcagcagcaacgtgatcatcggttgagaaacggtggtgttagcaggctccagcggcagaggtacagcagcagagagcatcggcagtagccacggcgcagcaacaccgccaattacgcagcaaatcgccagtgccactacgcttacgctcatcaggagcggcgcacaggtggcgttttcggcttctttggtgcgcggcgcgccgaggaacgtgacgccatagactttcgccatacacatcaccgccagcgcaccggtaattgccagccccacagcgagcagcggccccagcagacgggcaacaaacgcgccactattgctcagtttgaaaaaactttgatagataacccattccccggcaaaaccattcagcggcggcagcgcagccattgccatcagcccgactaacatggcgatggagataaccggcattttcttgccaataccaccgagtttttcgatatcgcgatgaccggtacggaaccagacgctccccgccccgaggaacagtacgcttttgaacaggctatggttaagcagatggtacagaccaccgaccaggccaagagcaatcagcgccggttgttcgagcgcgatacccgttacgccagcgcccagccccagcaggatgatgccgatattttccagggtgtggtaagccagcaggcgctggatgttgtgctccaccagcgcatacagaccaccgacaaacgcggtgatcatgccgagcaccagcagcgcgatcccccaccacagcggtgcattaccgcccagcagactcagggttaaaatgcccagcaggccaattttcatgactaccgtagaaaacaacgcggcagctggcgcagaggcgttcgcatgtgcctgcggcacccagccgtgcagcggaataatcccggccagcaggccaaagccaatcactccgagcagccagatatcggaaccgagcggcagctgttgcatacgcatatccagcaggcgcagatccagcgtgccgtaacgctgccacagcagccagcaagcaatcgccagcagcagagtgccaagacgccccagcgcaaaccacagtttgccctctttgctgttgctggtgaggaacaccgcgcacagggccatgatttcggccattaccacgaacatgccgaggttgctggcaatgacggcgcagacggcggcagccatcaacatattgatctgcaagccgttgcacttcacctgcgcgtggcgatgccagtcaatgttgtagaggctgacaaacagaccgcacagaccgagcgtaatcagccaaatcgcgttaagcggagagatttgcacatcgtagcttaccaggctcagcgcaccgctcacgccaaccgcgccagtcagtacagtgaagcccgcggctgccgtatacagactaccaaccgcgccgccaattccagctatccagccacttaacgctttttgaaaagaaaagagaaatgccagaacagcggcggcgacaaaccacgccacgccgctattgatcagggaaattgcgctcatttagcctctccactttgagcctgctgaaacaaggtgagatcgccaaagtccgtgttaaaggtcagctcacgcttacgtttgctgacgcgggcgatatcggtgttatccaccagatgcagggctttagtcgggcacatccgcacgcaggccggaccttgttcatcaaagctacaaaggtcacatttgacggcgatcgcgcgaatacctggcacccagtcaagcaatgtgctgacacgcgccggagcaggcggtgccggtggcgctttcggggtattggcgtttgccggaatatccagcggacggctgccggaaaattcaattgcgccaaacgggcaggcgatgccgcacagcttgcagcttacgcacaggctttcattcaactgcacggccccatcgacgcgggtgatggcgttaaccgggcagaccaccgcgcagggtgcatcttcacagtggtgacagagctgcggcgcagattctttttcattcagcatcactctcaggcgcggcatactttgcaggccgtgctggcgatgcgtctcactacaggcggcctcacaagtgtggcagccgatacagagcgtggagtcagcaattacaaaacgattcaccaggcattcctcaggtgattgtcatttttgacgaaaacatgccgatgaaatgtcattttcgacactcatcgacacgcccatccccaaacaggcgtaacgcctgcaaaacgggcaaagcctcagctcatgctgccgggctttgtccctttaccagttggcttaaattcaccggcacattgttttcaatagcggtgtataagctgtcgtaaacgccagcgattttttcgagatagtgttccagaacctgttcgcgatcgcggatgttgaccttgccatcaatcatgccgtcaatgctcagttgcgcctgcgcaatccgctgtttgtcttcgccatcttttgtttcgacgtaatactcgatggtgtggctgttaaagccatccgccagggtgacgtaaatgcgaaaatgttcaaaaaggacgaaacagagttctttgtccggcgcgcagctcatggcgtgatgcaggcgcgctttgcttaacgtgatcccctgaaccaggctattgcagtagatgtgccactggtcctgtaggcgacgatgccgctgtgcgatgtaatcggctttctcgcttatttcccaaatagtcattgtcaggttacccgtttaacagagatgccagctttaagcattttttgtgccaacttttaatttattgttattaaagagatttttaagctaaagatgaatttcgtcgccgtgtcgacgtgtcatttcgacatcatcgacattattcaccgcagggataatcaacactggcacaattattgcttgtagctggcaatagttaatgggaggcgatatgcacgaaataaccctctgccaacgggcactggaattgatcgaacagcaggccgcaaaacacggcgcaaaacgcgtaactggggtctggctcaaaattggcgcattttcttgtgtcgaaaccagctctcttgccttttgttttgatctggtttgccgcggcagcgtggcggaaggttgtaaactgcacctcgaagaacaagaggccgaatgctggtgtgaaacatgccaacagtatgtgacgctactgacccagcgcgtccgccgctgtccacagtgtcatggtgacatgctgcagattgtggcagacgacggtttacagattcggcggatagaaatagaccaggagtgagcgatgtgtacaacatgcggttgcggtgaaggcaacctgtatatcgagggtgatgaacataaccctcattccgcgtttcgtagcgcgccatttgccccggcggcacgcccgaagatgaaaatcaccggcattaaagcgcctgaatttacccccagccagactgaagaaggcgacctgcattacggtcatggcgaagcgggcactcacgcaccgggcatgagccagcgtcggatgctggaagtcgaaattgacgtgctggacaaaaataaccgtctggctgaacgcaaccgcgcgcgctttgctgcccgcaagcaactggtgctcaacctggtttccagccctggttccggtaaaaccaccctgctgacggaaaccctaatgcgcctgaaagacagcgttccgtgcgcagttattgaaggcgaccagcaaaccgtgaacgatgccgcacgcattcgcgctaccggcacaccagcgattcaggtgaacaccggtaaaggctgccatcttgacgcacagatgattgccgacgccgcaccgcgtctgccactggacgataacggtattctgtttatcgaaaacgttggcaacctcgtatgcccggccagcttcgatctcggtgaaaaacacaaagtggcggtgctttccgttaccgaaggtgaagacaaaccactgaaatatccgcatatgtttgccgccgccagcctgatgctgctcaacaaagttgacctgttgccgtatctcaactttgacgttgaaaagtgcatcgcctgcgcccgcgaagtcaatccagaaattgaaatcatccttatttccgccaccagcggcgaagggatggaccagtggctgaactggctggagacacagcgatgtgcataaggtaaaactggctggagacacagcgatgtgcataggcgttcccggccagatccgcaccattgacggcaaccaggcgaaagtcgacgtctgcggcattcagcgcgatgtcgatttaacgttagtcggcagctgcgatgaaaacggtcagccgcgcgtgggccagtgggtactggtacacgttggctttgccatgagcgtaattaatgaagccgaagcacgcgacactctcgacgccttacaaaacatgtttgacgttgagccggatgtcggcgcgctgttgtatggcgaggaaaaataatgcgttttgttgatgaatatcgcgcgccggaacaggtgatgcagttaattgagcatctgcgcgaacgtgctagtcatctctcttacaccgccgaacgccctctgcggattatggaagtgtgtggcggtcatacccacgctatctttaaattcggcctcgaccagttactgccggaaaacgttgagtttatccacggtccggggtgcccggtgtgcgtactgccgatgggtagaatcgacacctgcgtggagattgccagccatccggaagtcatcttctgtacctttggcgacgccatgcgcgtgccggggaaacagggaagcctgttgcaggcaaaagcacgcggtgccgatgtgcgcatcgtttacagcccgatggatgcgttgaaactggcgcaggagaatccaacccgcaaagtggtgttcttcggcttaggttttgaaaccactatgccgaccaccgctatcactctgcaacaggcgaaagcgcgtgatgtgcagaatttttacttcttctgccagcacattacgcttatcccgacgttgcgcagtttgctggaacagccggataacggtatcgatgcgttcctcgcgccgggtcacgtcagtatggttatcggcaccgacgcctataattttatcgccagcgattttcatcgtccgctggtggttgctggattcgaaccccttgatctactacaaggcgtggtcatgctggtgcagcagaaaatagcggcccacagcaaggtagagaatcagtatcgtcgagtggtaccggatgccggtaacctgctggcgcaacaggcgattgccgatgtgttctgtgtcaacggcgacagcgaatggcgcggcttaggcgtgattgaatcttctggcgtgcacctgacgccggattatcaacgattcgatgccgaagcacatttccgcccggcaccgcagcaggtctgcgatgacccgcgcgcgcgttgtggtgaggtattaacgggcaaatgtaagccgcatcaatgcccgctgtttggtaacacctgtaatcctcaaaccgcgtttggtgcgctgatggtttcctccgaaggagcgtgcgccgcgtggtatcagtatcgtcagcaggagagtgaagcgtgaataatatccaactcgcccacggtagcggcggccaggcgatgcagcaattaatcaacagcctgtttatggaagcctttgccaacccgtggctggcagagcaggaagatcaggcacgtcttgatctggcgcagctggtagcggaaggcgaccgtctggcgttctccaccgacagttacgttattgacccgctgttcttccctggcggtaatatcggcaagctggcgatttgcggcacagccaatgacgttgcggtcagtggcgctattccgcgctatctctcctgtggctttatcctcgaagaaggattgccgatggagacactgaaagccgtagtgaccagcatggcagaaaccgcccgcgcggcaggcattgccatcgttactggcgatactaaagtggtgcagcgcggcgcggtagataaactgtttatcaacaccgctggcatgggcgcaattccggcgaatattcactggggcgcacagacgctaaccgcaggcgatgtattgctggtgagcggtacactcggcgaccacggggcgactatccttaacctgcgtgagcagctggggctggatggcgaactggtcagcgactgcgcggtgctgacgccgcttattcagacgctgcgtgacattcccggcgtgaaagcgctgcgtgatgccacccgtggtggtgtaaacgcggtggttcatgagttcgcggcagcctgcggttgtggtattgaacttagtgaagcggcactgcctgttaaacctgccgtgcgtggcgtttgcgaattgctgggactggacgccctgaactttgccaacgaaggcaaactagtaatagctgttgaacgcaacgcggcagagcaagtgctggcagcgttacattcccatccactggggaaagacgcggcgctgattggtgaagtggtggaacgtaaaggtgttcgtcttgccggtctgtatggcgtgaaacgaaccctcgatttaccacacgccgaaccgcttccgcgtatatgctaataaaattctaaatctcctatagttagtcaatgaccttttgcaccgctttgcggtgctttcctggaagaacaaaatgagttatacaccgatgagtgatctcggacaacaagggttgttcgacatcactcggacactattgcagcagcccgatctggccagcctgtgtgaggctcttagccaactggtaaagcgttctgcgctcgccgacaacgcggctattgtgttgtggcaagcgcagactcaacgtgcgtcttattacgcgagccgtgaaaaagacacccccattaaatatgaagacgaaactgttctggcacacggtccggtacgcagcattttgagccgccctgatacgctgcattgcagttacgaagaattttgtgaaacctggccgcagctggacgcaggtgggctatacccaaaatttggtcactattgcctgatgccactggcggcggaagggcatatttttggtggctgtgaatttattcgttatgacgatcgcccctggagcgaaaaagagttcaatcgtctgcaaacatttacgcagatcgtttctgtcgtcaccgaacaaatccagagccgcgtcgttaacaatgtcgactatgagttgttatgccgggaacgcgataacttccgcatcctggtcgccatcaccaacgcggtgctttcccgcctggatatggacgaactggtcagcgaagtcgccaaagaaatccattactatttcgacattgacgatatcagtatcgtcttacgcagccaccgtaaaaacaaactcaacatctactccactcactatcttgataaacagcatcccgcccacgaacagagcgaagtcgatgaagccggaaccctcaccgaacgcgtgttcaaaagtaaagagatgctgctgatcaatctccacgagcgggacgatttagccccctatgaacgcatgttgttcgacacctggggcaaccagattcaaaccttgtgcctgttaccgctgatgtctggcgacaccatgctgggcgtgctgaaactggcgcaatgcgaagagaaagtgtttaccactaccaatctgaatttactgcgccagattgccgaacgtgtggcaatcgctgtcgataacgccctcgcctatcaggaaatccatcgtctgaaagaacggctggttgatgaaaacctcgccctgaccgagcagctcaacaatgttgatagtgaatttggcgagattattggccgcagcgaagccatgtacagcgtgcttaaacaagttgaaatggtggcgcaaagtgacagtaccgtgctgatcctcggtgaaactggcacgggtaaagagctgattgcccgtgcgatccataatctcagtgggcgtaataatcgccgcatggtcaaaatgaactgcgcggcgatgcctgccggattgctggaaagcgatctgtttggtcatgagcgtggggcttttaccggtgccagcgcccagcgtatcggtcgttttgaactggcggataaaagctccctgttcctcgacgaagtgggcgatatgccactggagttacagccgaagttgctgcgtgtattgcaggaacaggagtttgaacgtctcggcagcaacaaaatcattcagacggacgtgcgtctaatcgccgcgactaaccgcgatctgaaaaaaatggtcgccgaccgtgagttccgtagcgatctctattaccgcctgaacgtattcccgattcacctgccgccactacgcgagcgtccggaagatattccgctgctggcgaaagcctttaccttcaaaattgcccgtcgtctggggcgcaatatcgacagcattcctgccgagacgctgcgcaccttgagcaacatggagtggccgggtaacgtacgcgaactggaaaacgtcattgagcgcgcggtattgctaacacgcggtaacgtgctgcagctgagtttgccagatattgttttaccggaacctgaaacgccgcctgccgcaacggttgtcgccctggagggcgaagatgaatatcagttgattgtgcgcgtgctgaaagaaaccaacggcgtggttgccgggcctaaaggcgctgcgcaacgtctggggctgaaacgcacgaccctgctgagtcggatgaagcggctgggaattgataaaagcgcattgatttaactgcaaattgccggacagatctgcctgtccggcatattattcatgaggttttttcggacgatatttttccggcagttctggcaccggacgcttgtcatcgatgagatgacgcacggttaagatcggatgacgccacagcattctcggcccggcccaacgcataatctgtttcatctcttcacgctttgcaggctggtaacagtgcaccggacactgcttacaggctggtttctcttcgccgaacacacatttatccagccgcttttgcgcgtaaacaaacaacgcctcgtaatgctccggctccgcactcgcctgcgggcatttcgcttgataaagatcgatcatttttttaatcgtcagtttttcacgagagatacgcttgccggacatgctgcctccacctcattaagatgtatttatattacatcttaatcttaaagggcactatgactccaaagaagaagggttagccaaccgatacaattttgcgtacttgcttcataagcatcacgcaaaagctgcaaaacagcatctttcccggaaccagcatcaagaactcgccgttcgcttcttcccctgaaatgattaactccggtatcatgtgcgccttatgtgattacaacgaaaataaaaaccatcacaccccatttaatatcagggaaccggacataaccccatgagtgcaatagaaaatttcgacgcccatacgcccatgatgcagcagtatctcaggctgaaagcccagcatcccgagatcctgctgttttaccggatgggtgatttttatgaactgttttatgacgacgcaaaacgcgcgagccaactgctggatattagtctgaccaaacgcggtgctagcgcgggagagccgatcccgatggcggggattccctaccatgcggtggaaaactatctcgccaaactggtgaatcagggagagtccgttgccatctgcgaacaaattggcgatccggcgaccagcaaaggtccggttgagcgcaaagttgtgcgtatcgttacgccaggcaccatcagcgatgaagccctgttgcaggagcgtcaggacaacctgctggcggctatctggcaggacagcaaaggtttcggctacgcgacgctggatatcagttccgggcgttttcgcctgagcgaaccggctgaccgcgaaacgatggcggcagaactgcaacgcactaatcctgcggaactgctgtatgcagaagattttgctgaaatgagcttaattgaaggccgtcgcggcctgcgccgtcgcccgctgtgggagtttgaaatcgacaccgcgcgccagcagttgaatctgcaatttgggacccgcgatctggtcggttttggcgtcgagaacgcgccgcgcggactttgtgctgccggttgtctgttgcagtatgcgaaagatacccaacgtacgactctgccgcatattcgttccatcaccatggaacgtgagcaggacagcatcattatggatgccgcgacgcgtcgtaatctggaaatcacccagaacctggcgggtggtgcggaaaatacgctggcttctgtgctcgactgcaccgtcacgccgatgggcagccgtatgctgaaacgctggctgcatatgccagtgcgcgatacccgcgtgttgcttgagcgccagcaaactattggcgcattgcaggatttcaccgccgggctacagccggtactgcgtcaggtcggcgacctggaacgtattctggcacgtctggctttacgaactgctcgcccacgcgatctggcccgtatgcgccacgctttccagcaactgccggagctgcgtgcgcagttagaaactgtcgatagtgcaccggtacaggcgctacgtgagaagatgggcgagtttgccgagctgcgcgatctgctggagcgagcaatcatcgacacaccgccggtgctggtacgcgacggtggtgttatcgcaagcggctataacgaagagctggatgagtggcgcgcgctggctgacggcgcgaccgattatctggagcgtctggaagtccgcgagcgtgaacgtaccggcctggacacgctgaaagttggctttaatgcggtgcacggctactacattcaaatcagccgtgggcaaagccatctggcacccatcaactacatgcgtcgccagacgctgaaaaacgccgagcgctacatcattccagagctaaaagagtacgaagataaagttctcaccagtaaaggcaaagcactggcactggaaaaacagctttatgaagagctgttcgacctgctgttgccgcatctggaagcgttgcaacagagcgcgagcgcgctggcggaactcgacgtgctggttaacctggcggaacgggcctataccctgaactacacctgcccgaccttcattgataaaccgggcattcgcattaccgaaggtcgccatccggtagttgaacaagtactgaatgagccatttatcgccaacccgctgaatctgagcccgcagcgccgcatgttgatcatcaccggtccgaacatgggcggtaaaagtacctatatgcgccagaccgcactgattgcgctgatggcctacatcggcagctatgtaccggcacaaaaagtcgagattggacctatcgatcgcatctttacccgcgtaggcgcggcagatgacctggcgtccgggcgcagtacctttatggtggagatgactgaaaccgccaatattttacataacgccaccgaatacagtctggtgttaatggatgagatcgggcgtggaacgtccacctacgatggtctgagcctggcgtgggcgtgcgaggaaaatctggcgaataagattaaggcattgacgttatttgctacccactatttcgagctgacccagttaccggagaaaatggaaggcgtcgctaacgtgcatctcgatgcactggagcacggcgacaccattgcctttatgcacagcgtgcaggatggcgcggcgagcaaaagctacggcctggcggttgcagctctggcaggcgtgccaaaagaggttattaagcgcgcacggcaaaagctgcgtgagctggaaagcattagcccgaacgccgccgctacgcaagtggatggtacgcaaatgtctttgctgagtgtaccagaagaaactagccctgcggtcgaagctctggaaaatcttgatccggatagtctcaccccgcgtcaggcgctggagtggatttatcgcttgaagagcctggtgtaataacaattcccgatagtcttttgctatcgggaatattaacgacaactgacgaataaaataaaaacaccctgtataataggaaagcttattttacagggtaaaaccatgccatctacacgctatcaaaaaatcaatgcccatcactatcgccatatatgggtcgttggtgatattcatggtgaatatcagttattacaatcccgcttacatcaactctcttttttccccaaaatcgacttacttatttctgtcggcgataatattgatcgtggaccggagagtcttgacgtcctgcgcctgctaaaccaaccctggtttacgagcgttaaaggcaaccacgaagcgatggcgcttgaggcattcgaaactggcgatggcaatatgtggcttgccagcggtggtgactggtttttcgatttaaatgatagtgagcaacaagaggcaatagatctgttgctgaaattccatcaccttccacatattattgaaatcactaacgacaacataaaatatgccatcgcacatgcagattatccggggagtgaatatctctttggtaaagaaatagcggagagcgaattactctggcctgttgatcgtgtgcagaaaagccttaatggcgagttacaacaaataaacggcgctgattattttatatttggacatatgatgtttgataacattcagacgttcgctaaccagatttatattgataccggaagcccgaacagcgggcggctgagtttttataaaataaagtaatctcatgcttcttctgtgaagcatgagtaacccggtgttattgcaggccattattcatttttcgctaccagcaaagagagatcctgcttcaccagcgcgcgactggcactctccggcaaaccgtcgtctgtaataatctgatcaaactcgcttaatggtaacgccagccatgtcgccacctgaccatatttcgtcgcatcacagaccaaaactcgctggcggctggcactggcaatcgcccgtttcaccgtgactttatcttccgctggcgtagaaatcccccgcacactccaactgcttgcagaaataaaagcctgatcaatcatcaggctgcgcagcatggtcgcagcggcttccccgacacaggaacggttttcccgacacactgcaccgccagtgtgaataattgtgcaattactgttgtcgagcaagtagtccgcaataacgaaatcgtttgtgaccacagtcagactctccatgtgaatcagatgctgtgctatcgctaacgtggtcgttcccgcatccagatagatacaacttcccggctgaacaagacttgccgccagcttgccaatagccgctttttgcgtcattgccagcgcagtttttacctgatgagaaggttcatgcgccacgcgtcccggagactggacgcctccggacaccagcacaacggctccctgctgctccagtttttgtaaatcccgacgaatggtcatatgactcacattcattctgtccgttagttcagcaatactgacaatgcctttttcagctaccatctcaaggatgatttggcgacgctctacgggtatcaacttttgctccttcctttgtcctgcactcattctacgctatttgcctgcgaaacgtgcgcggcgcaactaacgcttagttcacataaaataacacacaatgttaatttatgtgaatcagatcaccataccgttatcttccagcgcttatattcacaatatcaaacaaaatatcacttaaattaacaaggagagcagatgaaaacgggatctgagtttcatgtcggtatcgttggcttagggagtatgggaatgggagcagcactgagttatgtccgcgcaggtctttctacctggggcgcagacctgaacagcaatgcctgcgctacgttgaaagaggcaggtgcttgcggggtttctgataacgccgcgacgtttgccgaaaaactggacgcactgctggtgctggtggtcaatgcggcccaggttaaacaggtgctgtttggtgaaacaggcgttgcacaacatctgaaacccggtacggcagtaatggtttcttccactatcgctagtgctgatgcgcaagaaattgctaccgctctggctggattcgatctggaaatgctggatgcgccagtttctggtggtgcagtaaaagccgctaacggtgaaatgactgtcatggcctccggtagcgatattgcctttgaacgactggcacccgtgctggaagccgttgccggaaaagtttatcgcataggtgcagaaccgggactaggtagcaccgtaaaaattattcaccagttgttagcgggcgtacatattgctgccggagccgaagcgatggcacttgcagcccgtgcggggatcccgctggatgtgatgtatgacgtcgtgaccaatgccgccggaaattcctggatgttcgaaaaccggatgcgtcatgtggtggatggcgattacaccccgcatagtgccgtcgatatttttgttaaggatcttggtctggttgccgatacagccaaagccctgcacttcccgctgccattggccagtacagcattgaatatgttcaccagcgccagtaacgcgggttacgggaaagaagacgatagcgcagttatcaagattttctctggcatcactctaccgggagcgaaaagttgagctaaactctaccgggagcgaaatcatgatcaagattggcgttatcgccgatgattttaccggcgcgacggatatcgccagttttctggtggaaaacggtctaccaacggtacaaattaacggtgttccaacaggtaaaatgccggaagcaatcgacgcactggtgatcagcctgaaaacgcgctcctgtccagtggttgaagccacacagcaaagcctggcggctctgagctggttgcaacagcaaggttgcaaacagatctatttcaaatactgctctactttcgacagtacggcgaaaggtaatattggcccggttaccgatgccttaatggatgctctcgacacgccgtttacggtcttctctccggccctgccggtcaacggacgtacggtttatcaggggtatttgttcgtaatgaatcaactgctggccgaatccgggatgcgccatcacccggtaaatcccatgaccgacagctatcttccccgtctggttgaagcgcaatccacagggcgctgcggcgtcgttagcgcacatgttttcgaacaaggtgtggatgccgttcgtcaagagctggctcgcttacagcaagagggctaccgctacgcggtgcttgatgcgctgaccgaacaccatctggaaattcagggagaagccttgcgcgatgccccactggtaacgggcggttctggtctggcgattggcctggcccggcagtgggcgcaagaaaacggtaaccaggctcgcaaagcagggcgtccgctcgctgggcgcggcgtagtgctctccggtagttgctctcaaatgaccaaccgccaggtagcacattaccgtcaaattgcaccagcccgtgaagttgatgtggcacgctgcctcagtattgaaactctggccgcttatgcacacgaactggcagagtgggttctgggccaggaaagtgtacttgctccactggtttttgccaccgccagcactgacgcattggcagcaattcaacagcaatacggtgcacaaaaagccagtcaggcagtagaaacactgttttctcaactagcggcgcggttagcagcggaaggcgtgacacgctttattgtcgcaggcggtgagacctccggcgtagtcacacagagcctgggaataaaagggtttcatattggcccaaccatttccccggcgtgccgtgggtaaacgcactggataagcctgtctcactcgcccttaaatctggcaacttcggtgatgacgcctttttttcacgagcccaaagagagtttttatcatgagcgatttcgcaaaagtagagcagtctttgcgagaggagatgacgcggattgccagtagtttctttcagcgcggctatgcaaccggtagcgctggcaatctgagcctgcttttacctgacgggaatttactggcgacaccgacaggtagttgcctgggcaatctcgatccgcagcggctttccaaagtcgccgcggatggcgaatggttaagtggtgacaaacccagcaaagaggtgctctttcatctggcgctgtatcgcaacaatccgcgctgtaaagcggtggtgcatttgcacagcacatggagcacggcgctttcctgcctgcaagggctggacagcagcaacgttattcgtccgttcacaccatacgtggtgatgcggatgggaaatgtcccgctggtgccttattaccgaccgggcgataaacgcatcgcacaggatctggcggaactggcagcagacaatcaggcttttttactggcaaatcatggcccagtggtttgcggtgaaagcctgcaagaagccgccaacaatatggaagagctggaggaaacggcaaagctgatttttattctcggtgaccgcccgatccgttatctgaccgcaggtgaaattgcggaattaaggagttaatgcaatgcctcgttttgcagctaatttatccatgatgttcaccgaagtgccttttattgaacgcttcgccgcagcgcgaaaagccgggttcgatgctgtggaatttctgtttccctataactactccaccctgcaaatccaaaagcaactggagcaaaaccatctgacactggcgctgttcaataccgctcccggagatattaatgcgggggaatggggattatccgcccttcccggacgtgagcacgaagcacacgcagacatcgacctggcactggaatatgcattggcgctcaattgtgaacaagtccatgtgatggcaggcgtcgtgcccgctggcgaagatgctgaacggtaccgggcagtatttatcgataatatccgctacgctgccgaccgctttgcgccacacggcaagcgaatattagttgaagcactcagccccggcgttaagcctcattatctcttctccagccagtatcaggcactggctattgttgaagaggttgcgcgagataacgtgtttattcaactagatacttttcatgcgcaaaaagtagatggcaacctgacgcatttaatccgcgactacgccgggaaatatgcgcacgtacaaattgccggactacctgatcgacatgaaccggacgatggagaaatcaactatccgtggctgttccgcctgttcgatgaggtgggatatcagggctggatcggttgtgaatataaacctcgtggcctcaccgaagaagggcttggctggtttgacgcctggcgctaattcgttaaatccctaattacaacgtacccatacatccccccatctacggatggggtaggttaactataactttcagacagggtttcccatgtccacaattacattgttatgcattgcgttagctggcgtaatcatgctgttgctgctggtcatcaaggcaaaggtacaaccattcgttgctttgctcctcgtcagcctgttagtcgcacttgcggcaggtataccggcgggcgaagtgggtaaagtgatgatcgccgggatgggcggtgtgcttggttccgtcactattattattggtctgggcgctatgctggggcgtatgatcgaacactctggtggtgcagagagtctggctaattatttcagtcgcaagttaggtgacaaacgaactatcgctgcgctgactctggcagcgttcttcctcggtattcccgtcttctttgatgtcggctttattattcttgcgccaatcatttacggttttgccaaggttgccaaaataagcccactcaaatttggcctgcctgtcgctgggatcatgctcactgttcacgtggcggtaccgccgcatccaggccctgtcgccgcagcggggttactccacgcagacatcggctggctaaccatcatcggtattgcgatttctattcccgtaggggttgttggctactttgcagcgaaaataatcaataagcgccaatatgcgatgagtgtagaagtactggaacagatgcaactggctccggccagtgaggaaggcgcgacaaaattaagcgataaaataaatccaccgggcgtcgcgctggtcaccagcctaattgttattcctatcgcgattatcatggcgggtacggtttccgcaacactgatgccgcctagccatcccctgcttggtacgctacagctgatcggcagtccaatggtagctctaatgattgcgctggtgctggcattctggttattggctttacgtcgcggctggagcttacaacacaccagcgacattatgggcagtgcgcttcctactgcggcggtagtgattttggttactggtgctggaggggtatttggcaaagtgctggtggaaagcggcgtcggcaaagcccttgccaacatgctacaaatgattgacctgcctctgttaccagccgcatttattattagtctggcgctgcgtgcaagccaggggagtgcaaccgtagcaatactgacaaccggcgggttactcagtgaagcggtgatgggattgaatccgattcagtgcgtattggtgacgctggcagcctgctttggtgggcttggtgcgagtcatattaatgacagtgggttctggattgtgaccaaatatctggggttgagcgtagcagacggtctgaaaacctggacagtgttaacgaccattctcggttttaccggactcttaattacctggtgcgtatgggcggtaatttgaccttaataaaaaggtccgatgggcatcggaccttttattgtgcacagaaaaggccagcctcgcttgagactggcctttctgacagatgcttacttactcgcggaacagcgcttcgatattcagcccctgcgtttgcaggatttcgcgcaaacggcgcaggccttcaacctgaatctggcgaacacgttcacgggtgaggccaatttcacgacctacatcttccagtgttgccgcttcgtaccccagcaaaccgaatcgacgtgccagcacttcacgctgtttggcgttcagctcgaacagccatttgacgatgctctgcttcatatcgtcatcttgcgtggtatcttccggaccgttctctttttcatcggccaggatgtccagcaacgctttttcggaatcaccacccagcggggtgtctacgctggtaatgcgctcgttaagacgaagcatacggctgacgtcatcaactggcttatccagttgctctgcgatctcttccgcacttgattcatggtccagcttatgggacaactcacgtgcggttcgcaggtaaacgttcagctcctttacgatgtgaatcggcaaacgaatagtacgggtttggttcataatcgcccgttcaatcgtctggcgaatccaccaggttgcgtatgtactgaagcggaaaccacgttccgggtcaaacttctctaccgcgcggatcagccccaggttgccctcttcgataaggtccagcaacgccagaccacgattgccataacggcgggcaatttttaccaccagacgcaagttactctcgatcatccggcggcgagaggcgacatctccacgcagtgcgcgacgcgcaaaataaacttcttcttcggccgttaacagtggactataaccaatctcaccaaggtaaagctgagtcgcgtccaacacacgctgtgtggctccctggcttaacagttcctcttcggccaaatcgttatcactgggttcctgttctactaaggccttttcgtcaaaaacctcaactccgttctcatcaaattccgcatcttcatttaaatcatgaactttcagcgtattctgactcataaggtggctcctacccgtgatcccttgacggaacattcaagcaaaagcctggttccgccgatttatcgctgcggcaaataacgcagcgggtttacggatttccccttgtaacgaatttcaaaatgcaagcgtgtactactggttccggtgctacccatggtcgctattttttgccccgccttaacttcttgttgttcccggaccagcattgtgtcgttatgggcgtaggcactcaggtaatcatcattatgtttgatgataatcagattaccgtagccgcgcagcgcgttaccagcataaacaacgcggccatctgcggtcgcgataattgcctgtcctttgctgcctgcgatatcaatccccttgttgcccccctcagaagcgccaaaggtttcgatcactttgccctcagtcggccagcgccaggtggagataggcgtactggtacttgtactgctgacagtcggctcggttgtgcttgctgttggtaccgttacaggcgctgtgaccgtggtcgcagttggcttgttgttcggcaacattttgttagcactctgttcaccgctagactcagaatacgtaattgtcggttggctcgcaacagcaacggtggaattttgtgcaggcttgatcacaactccttgctctgctgcgtcggcctgggtaatggcatttccgccagtgattggcgtaccggaagcattacccacctgcaaggtctgaccaacgttcagcgcgtatggtgcctgaatattgttgcgctgagcaaggtcacggaaatcgttgccagtaatccaggcgatatagaaaagtgtgtcgccttttttcacggtataggtactgccgctataactgcctttcggaatgttcccatactgacggttatagacgatgcgtccgttttccatctgtaccggctgctgagctactggctgcactggctggatttgcggttgttgagtagcctgaatttgtggctgctgcaccggctgaatttgcggttgctgcgctgtagacgtcgtccccattttcggcggcggcgtaatcaacataccagaattagtatttgcaggcgcattgccattaacggagctgaccggtgccggtggattactagtgtcagaacagcctgccagccataggctaaccagactcaaagccgcaatgcggcgaacggtgaattttgggcttcccgcgctcatttatcccccaggaaaaattggttaataaccagtgacataattaccgtgcaaggcaccctactgaacactggaaaagatgttcacgatacgctgacctgcggcaaaataaccaggaaaaatccaggtatttcctcacgttttaagccagctcacccttcactaaagggacaaagcgcacggcctccacggtatcgataataaattcgcctccccgacgacgcacccgtttcaaatactggtgctcctcccctacgggtaagacgagaatcccgccttcgtccagctgcgtcattagcgcagttggaatttccggcggtgccgccgtaacaatgatagcgtcaaacggcgcacgtgcctgccaaccttgccatccatcgccatgacgggtactaacattatgtaaatcaagatttttcaggcggcgacgtgcctgccactgcaagcctttaatccgttcaacgctgcaaacatgctggacaagatgcgccaggattgccgtttgatatccgctaccggtgccaatttccagcacccggctctgcggcgtcagctcgagtaattcggtcattcgcgccaccatatatggctggctaattgtctgcccctgacctatcggcaaagcgatattgtcccaggctttttgttcaaacgcttcatcaacgaatttttcacgcggcacggcggcaagtgcattcagcacctgctcatcctgaataccttgcgcacgtaattgatccagaagtgcttgtacgcgtctgcttaccattgcgtgccaactcccacgctgtttaaccagtcactaaccacatcttgcgcgctatgcgcagttaaatccacatgcagcggcgtgatggagacatagccctcatctaccgcagcaaaatcggtccccggaccagcatcacatttaccgcccggcgggccaatccagtacagcgtattgccgcgcggatcttgctgcgggatcacctgatctgccggatgtcgtgtaccgcagcgcgtcacgcgaatacctttgatttgatccaagggtaaatccggaacgttaatattaagaatacgcccggtgcgcagcggctctttacacagtgcgcgcaaaatactacaggttaccgccgcggcagtgtcgtaatgtttatgcccgtcaaggctgacggcaagcgccggaaaacctaaatgacggccttccatcgcggcggctaccgtaccggaataaataacatcatcccccagattcggcccggcgttaattccggacacaacaatgtccgggcgcggacgcatcagagcattcacgccaagatagacgcaatcggtcggggttcccatttgcacagcaatatcaccattttcaaaggtaaacgtgcgcagggaggattccagtgtcagagaattactagcgccgctgcggttacgatcgggggcgaccacctgaacgtcagcaaactcacgcaaggctttcgccagcgtttgtataccgggtgcatgtaccccgtcatcattactcagcaatatgcgcataatcacctgttgtgttgataagttccctgacaacgctggttgcaaaactacccgccggaagccagaaacggatctctacggtgacgtcatcccaccaattccagcttaattgttgcggatacagcagcatcgctctgcgcgcggcttcaactttttcgcgcaccagtaaagcttgtaattcagtttctgcggcgacagctgcttgttcgaatgccagcgcttcacgctgagttccccattcgccactgcctggcaatgcggcggttatcatcaactctttatcgttgacgcgacgctgtaattccgccagttcttcggtggttgcgacaaaccagctaccacgtccggctaattgtagcgcatcgccgtcaacaacttgattaacgtctgcttttttgaggcgctcagcaacaatctgattaaacaacgcactgcgggctgcgctcaaccaaaaactccgtttattgcgatcgcgcaccggagtattggtttgcgcccagcgctgcgccccctgcaagttgctaccgccaatcccaaaacgttgggcaccgaagtagttcggtacaccttttacgcaaatatcgatcagacgttgttcaacgtcatcgcgattgctcacttcgcgcagaaccagggtaaaggcgttacctttcagcgcgcctaaacgcagcttgcgcttgtgccgcgcatactccagcacctggcagccttccagttgaaaggcgctcagatcgggcatttccttgcccggcacgcgagcgcataaccactgttccgtaacagcatgtttgtctttttgcccagcgaagctgacttcacgggcatgaattttcaggaatttcgccagtgcatccgccacaaaacgggtattgcagccgtttttgaggattctaaccagaatatgctcaccttcaccatcaggctcaaagcccaaatcttccaccaccacaaagtcttccggattggctttcagcagcccggtgccttgcggtttaccgtggaggtaagtgagattatcaaactcaatcattttgttgccttaatgagtagcgccaccgcttcacaggcaatcccttccccacgtccggtaaatcccagtttttccgtagtagtggctttcacgttaacatcatccatatggcagccgagatcttcggcaataaacacgcgcatttgtggaatgtgcggcaacatcttcggtgcctgagcgatgatagtgacatcgacgttgccaagggtataacccttcgcctgaatacgacgccaggcttcgcgtagcagctcgcggctatcggcacctttaaatgccggatcggtatccgggaacagcttgccgatatcccccagcgccgccgcgccaagcaatgcatcggtcaacgcatggagcgccacgtcgccatcagaatgcgccagcaatcctttttcgtaaggaatgcgtacgccaccaatgataattgggccttcaccgccaaaggcatgtacgtcaaaaccgtgtccaattcgcattatgtattctcctgatggatggttcgggtgaggtaaaactcggccagtgccaaatcttccgggcgcgtgactttaatgttatccgcacggccttcgaccaactgaggatggaatccgcaatattccagcgcgctggcttcgtcggtaatagtcgcgccttcatttagagcgcgcgtcagacagtcatgtaacagctcacgagggaaaaattgcggcgtcagcgcgtgccataagccgttgcgatcaacggtatgagcaatggcatttttgcccggttcggcacgtttcatagtatcgcgcactggtgcggcgaggatcccccccgtgcggctggtttcgctcaacgccaacaatcgcgcgaggtcatcctgatgcaaacaaggacgagcggcgtcatgcaccaatacccactgcgcgtcgccagcggctttcagacctgccagcacggaatcggcacgctcatcaccgccatctacaacggtgatttgcggatgattcgccagaggaagttgtgcaaaacggctatcgccaggacttatggcaatgacgacacgtttcacccggggatgcgccagcagcgcatgcacgctgtgttcaagaatggtttgattaccgatactgagatattgcttaggacattccgtttgcattcgacggccaaatccggccgccggaaccacggcgcaaacatccaaatgagtggttgccatgttaattcccgggctgatttatcgattgttttgccccgcagactgtgcgcgcttgctcgcgtcaggcaccagacgataaaaagtttcgcccggcctggtcatgctgagttcattacgcgcacgctcttcgagcgcctcctggccgccattgagatcgtcaatttcggcaaaaagttgatcgtttcgcgctttaagtttcgcgtttgtagcttgctgtgccgccacatcatcattgacgcgggtatagtcatgtataccgttcttaccgaaccacaggctatactgtagccagaccagaatagccagcaacagcagcgttagtttacccatcctgccccctgaaaaacggcatcatcatcccatgcatccgaagacgactctacatcctctgttggggataccgcgacaacgcgggcaaatgtaccacatttgtccattgttacgtatacccagggcgtgcagaacataatctcattattagttacggtttgaattatgaacagaggagacgggaaagtacaaattagcccagtagccacataaacagtgcgccaaacataatgcctactgtcaccagggtgaaaacaatactgtagcgtagctttccgtccatcaaactatgcagcgcaatccccaccactaccgcgacgggcatcagcgccagaaagaaaggccaggtgtagataaagaagaacagcgtgttagagccataaatcaacatcggcatcgccagcgcaaataaccaggagataaaaccgaccacggcaccaggcagactccatgtggtttcttcatcctcagtaaggctgtcgttatttgttagtgtaatgttatggctattacgcatatttgatcctgttactttgacgaaccgggcatggaaacccggtggtgtctcaggatctgataatatcgttctgtctcaacagatctaataattgctgtaccaaatttgttactaattgttcaccattgagatgaatttctgcgctttcaggcgcttcgtaaacggaatctattcccgtaaagttgcgcagttcaccggcacgcgctttcttatataagcctttgggatcgcgggcttcgcaaatcgccagcggcgtatcgacaaacacttcgataaagcgcccttctcctacgcgttcgcgaaccatctggcgttcggcgcggtgtgggctgataaatgcggtcagcaccaccagtccggcttcaaccatcaaattcgccacttcaccgacgcgacggatattctctttacgatcggcatcgctaaaaccgagatcgctgcataatccgtggcgaacattgtcgccatccagcagatacgtactgacgccgagtttatgtaacgcctcctccagcgccccggcgaccgtacttttaccggacccggagaggccggtaaaccacagcactacaccacgatgaccgtggtgtagctcgcgttgttgcacagtgaccggatggctatgccagacgacgttttcgtcatgcagcgccattatttatcccccagcaaatcgcgcgcgccccagtgcggaaagtggcgacgaaccagagcattcaattccagttcgaatgcactgaattcagatggcgcagcagttgcctggctaactggctcgtgcaccataccggcacccacggtcacattgctcaggcgatcgataaaaatcagcccacccgtcaccggattttgttgataacgatctaacaccagcggctcgtcaaaagtgagatccacgaggccgatcccattcagtggcaggttttcaacttcacgctgggtaaggttattaatatcaacctgatagcgaatgccatcaacacgcgcgcgcgtcttcttaccggcaattttgatgtcgtaactctgccctggagaaagcggctgttccgccatccataccacatccacgctcgcgctctgcaccgccggtaacgcttcgtctgccgccagcagcagatcgccacggctgatgtcgatctcatccgtcagcaccagggtgatcgcttctccggcaaaggcttcttcgcgatcaccatcaaaagtcacgatccgcgcgacgttactttccacaccagagggcagcactttgacacgttgcccgacttccacgcgaccggatgccagcgttccggcgtaaccacgaaaatcgagattcgggcgattaacgtactgcaccgggaagcgcattggctgagcatccaccactcgctggatctccacggtttccagcacttcgagcagtgtcggaccgctgtaccacggcatactttcactttggcttgccacgttgtcgccttccagtgcagagagcggcacaaagcggatatccagattacccggcagctgcccggcaaaggtcaaataatcttcacgaatacgggtgaacgtctcttcactgtaatccaccagatccattttgttgatcgccacgaccagatgtttgatccccaacagtgtggagataaaactgtgacgacgggtttgatcgagcacgcctttacgggcatcgatcagtaagatcgccagttcacatgtgcttgcgccagtcgccatattgcgggtgtactgctcgtgccctggggtgtcggcgataataaatttacgcttctcggtagagaaatagcggtaggccacgtcaatggtgatgccctgttcgcgctcagcttgcaggccgtccaccagcagagccagatccagcttttcgccctgggtgccgtgacgcttactgtcgttatgcaggctactgagctgatcttcgtagatttggcgggtatcgtgcagcagacgaccaatcagagtacttttgccgtcatcgacgctaccacaggtcagaaaacgcagcaggcttttatgttgttgcgcaatcatccaggcttcgacgccgccttcattggcgatttgttgtgcaagtgcggtgttcatcttaaaaatacccctgacgttttttcagctccatagaccccgcctggtcgcggtcaatcacgcggccctgacgttcactggtggtggaaaccagcatctcttcgatgatttccggcagtgtttgtgcattactctccaccgcaccggtcagcggccagcagcccagcgtacggaaacgcaccatccgttttttaatcacttcgcccggttgcaggtcgatacggttgtcatcaatcatcatcaacataccgtcgcgttccagaaccggacgttccgcagcgagatatagcggaacaatgtcgatattttccagccagatgtattgccagatatcctgctcggtccagttagagagcgggaagacgcggatgctttcgcctttgttaatttgcccgttgtagttgtgccacagctccgggcgctgatttttcggatcccagcgatggaagcggtcacggaaagagtaaattcgctctttagcgcgggatttctcttcgtcacggcgcgcaccaccgaaggcggcatcaaaaccgtatttgttcagcgcctgtttcaggccttcagttttcataatatcggtatgtttcgcgctgccgtgcacgaatggattaatccccatcgccacgccttccgggtttttatgcaccagcagttcgcagccgtaggctttagcagtacgatcgcggaactcatacatctcgcggaatttccagccggtatcgacatgcagcaacgggaaaggcagcgtacctggataaaacgccttgcgcgccagatgcagcatgacgctggaatctttaccgatagagtagagcatcaccggattactgaattctgccgccacctcgcgaataatgtggatgctttccgcctccagttgccgcaggtgagtaagtcgtatttgatccataaccgttcctttgcaataccgctattttcttgccatcagatgtttcgactatagggagcgtaagagaacgaatgaaattaccaattagaatgagtagttccttaacggaataacgatttggcaaagctaatatcaaaaagtgcttaaggcaccggatttcgggcgtttaggaagatttgaaattgttttagcgcagcggcagtttcatactatggcggtaaaaaaatttgcatggtatttaaggactcactatgttttccgcattgcgccaccgtaccgctgccctggcgctcggcgtatgctttattctccccgtacacgccagcagtcctaaacctggcgattttgctaatactcaggcacgacatattgctactttctttccgggacgcatgaccggaactcctgcagaaatgttatctgccgattatattcgccaacagtttcagcaaatgggttatcgcagtgatattcggacatttaatagtcggtatatttataccgcccgcgataatcgtaagagctggcataacgtgacgggaagtacggtgattgccgctcatgaaggcaaagcgccgcagcagatcatcattatggcgcatctggatacttacgccccgctgagcgatgctgacgccgatgccaatctcggcgggctgacgttacaaggaatggatgataacgccgcaggtttaggtgtcatgctggaattggcagaacgcctgaaaaatacgcctaccgagtatggtattcgatttgtggcgaccagcggcgaagaggaagggaaattaggcgctgagaatttactcaagcggatgagtgacaccgaaaagaaaaatacgctgctggtgattaatctcgataacttaattgttggcgataaattgtatttcaacagcggtgtaaaaacccctgaggcagtaaggaaattaacgcgcgacagggcgctggcaattgcgcgcagtcacggaatagccgcaacgaccaatccgggtttgaataaaaattatccgaaaggcactgggtgttgtaatgacgcagaaatattcgacaaagcgggcattgctgtacttagcgtggaagcgactaactggaatcttgggaataaggatggttatcagcaacgcgcaaaaacacctgccttcccggcgggaaatagctggcatgacgtaagactggataatcaccaacatattgataaggctcttcctggaagaatagaacgtcgctgccgtgacgttatgcggataatgctacctctggtgaaggagttggcgaaggcgtcttgatgggtttgaaaatgggagctgggagttctaccgcagaggcgggggaactccaagtgatatccatcatcgcatccagtgcgcccggtttatccccgctgatgcggggaacaccagcgtcaggcgtgaaatctcaccgtcgttgccggtttatccctgctggcgcggggaactctcggttcaggcgttgcaaacctggctaccgggcggtttatccccgctaacgcggggaactcgtagtccatcattccacctatgtctgaactcccggtttatccccgctggcgcggggaactcccgggggataatgtttacggtcatgcgccccccggtttatccccgctggcgcggggaactctgcgtgagcgtatcgccgcgcgtctgcgaaagcggtttatccccgctggcgcggggaactctctaaaagtatacatttgttcttaaagcattttttcccataaaaacaacccaccaaccttaatgtaacatttccttattattaaagatcagctaattctttgttttcaaacaggtaaaaaagacaccaaccttaaaccatccaaatctaccggggtacgcctgtttaacccaaatgtctggaactcaaatcccgtttccgtattcgttgcccatgccatcactacattgccttcttccgccagtccagctatttgttcccagatcatttcacgaatttttgcggatacatcacctacatatacccctgcacgtacctccaacaaccagatggctaatctgcctcgtaagcgcggaggtacattttcagtgaccacgaccaacatactcatttcagctactccgatggcctgcatctcccagactaacaggaagcggaatggcaacaggctgtgcatcttcaggtggggccggcggttgtatttctccagcggcaagcacgtcctctataagcggaatcaatttggctaatgttttactactgcgaaaaatatccctgcacgccaaacggacttcccggtccggctcaccagggttacgacgcgctatctcaaaagctttcggtacaacagtgtcaaatttaatgatgtctgcaatatcgtaaacaaaggaaagaggctttcctgtatgcacaaacccaatagctggtgcataaccagctgcaagtatcgccgcttcagttacgccgtataaacaggaagttgcagcgctaatgcattggttgatcgtatcgcccttttcccagtctttcggatcgtagcgacgtccattccatgtcacgccgtattgcttcgccagaagtgcgtaggttgcccgcacgcgactgccttctatacctctgagttgctctacggagcgccgggcaggcgcaggttctccaaaccgaagttcaaacattttacgtacgaccttcagacgcaaatcttcatccagagcaagttttgcctgatagagcagcttatcactacgcgcacctccaggctgaccagaagcataaacacgaacgcccgcttcccccacccataccaacaatgttccaacttgcgcagccaggcgtacagctgcatggctaacccgtgtaccaggttccagcatgatgcaggcaacgctgccaacaggaatatgagtgcggatccctgtcttgtcgataagtacaaacgcgccatctattacatcgatctgcccatattgcagaaagatcatggagacgcgatctttgagtggaatgggattaaggggaagccaggtcattttattacacctcaatcacagtggagccaaagatagcaagccacatcccatgcttttagctggcccaataccttgctgtacaagatctattaacgctggcgcgtcgttgatggtgagcacaccttcaaagcaaaccgtttggatctttccacttttaccatcaccagaaaaatactgtggccgttcgcttatgggatgcacatcttcaacgcgcgccgcattgcccaatttacgttgcaaccacgcgatttgttctgcttcttttattaacggaacccgacagcgtttaatattccctttactgtccaggcgcttttgattgtcgagaatagttttgatcggatttgcccgaagccgaaaatagagtggaacaccaacctgaagttgaaattcaacctgtttagttttaatgactgtcgcaacggcagtactaacaggcatttgcgcactctgcaataaaacatgacagccttctggtgtgtttcgcttctcaacatgaaaaagaaaatcacgagcagcatccggtctgtttggaaataaatgccataatccctggtgaagttggtaaagatccctgctccaggccctggcaatgatgactttactgagatacatccatacctcctttaatcacataccattctcgggaagcaaattgtcgaggcaaggtgatcatcggttcgtcgcgcgccgtaaattttaaatgatgccctgtaacactttcctcactatatatatcgccgccaacgggctcataatttaatagcgccttctgaggatcgcttgcctgacatgtccccaaaaaaagcgggtgtgttagtgggcaacttctccgccccaggtaaggtgtataccgaggctttaatactgctttttcaagttcactgataaccatcgttgcatggggtgttaaccagagagcgacggtaaaggaggcatcacataaatattcgcgccatgtttgaatcgtttcatgacttttcaaaccacggtaatcttctcgcgctccaaggactgtatggtaatcacgcaaccccgttacagacacacgacgatcgtcaagaatgagttcatcgcagcgcactgcaaattgcacactctcacttaacgcctgtaaactagaagtatcatcacgttggatcccaagacaagccccgagtagccctaataacccgcttcgggtcggaaatcttccggtaggtcgcgttccttcaaaggtcggctgcccccaggcttgcattggcccagcaagccgcaagatcaaataagatctcatgttcacgcctcgccattattacgaacccaggattttaactgttctaaagtaggcatttgtttaacttgagcagtaattgggtctacatcagataagctgaattgcgcagcagctccgttcagaccatatccattggcaacgcgatcccaatattgattaaacgcctgtatagacggttgcaaaaagccatctttcgctttaaccgctttttcaaaagcatttgccatagaaagtggcatatcggagaaattaaccattaccatatccgcagggttaaaagcggcataagtacgctgttttgctccagggacctctgttgccagcatatgaacaacatgggttgcaatttccagagcctgctccctggaggcaccacctaaattttcctgaagttgagcgaggttaatgttggcataacgataaaaaacaccgctactaaattcctgagttcccagatgtgcagaaccttgttcctgtaaatcatctacagcggtgaaccagtcaatatcagaatcaacctgatgagtagtgatcgcatgcgcaatggacattgcaccatcaacttttcccaactcagtcatcatgccgctggttgccattcttccactaagcgcaatatcaacaccctgctgtaaattcacacgtatggcggcaatatcttccttaagaactttgagcagctttttatcatccagattatcagcctctgcttttgcaacctgctcacagaaccaggctatttctcccacaacccagggagtaaccgcatcggcagaaatcttttcggcttcatcaacacttttaccggagagcagcgctaatgtcttatcgatgattttttggtcaaaacgttcaccaagtttttgccgaagaacatcacgtaattgtgcaagatgaatggttctgagactggattcaccaatattttgtgcgtaataaccacttttacgcatcgcacgtttaaggctttgactactaattcttactcgtcttttgccgccgaaaatagcgtctttctgcatgttcatatcgtcgcggttcagacaactagggctgtgagagatcagaacatgaatattgataaagttagacatagaaaggtttccttacgcatttttgtttgtggtcaatacaaaatcttccagaagttgctggcgttcgcgctttccccaccaggtcaacatcctggccattaatggccagtcaagtacgggttcggcgtgagtaagtaatcgacgtaactggaccatatcggctgttctgtcagcccgaattaattgaaagatacggcgctcgttaattcttccactattggctaaagctcttcccaagctgatacctgttgtttgctcgctttttttgtcctgatgtcggatgacattctttcctgcgctcaggcaaaacaccatgcgcaaaagagcctgctggtgacgtgggttttcccaaccaaaaggttgcaccagcctataaaacgcagggatatcgcgtaattcatcaggttcactaacacgtctaatttgcgcacaacttccattatccagttgttgccaggctcgatataaagccattgcatcaatttcatcagccattacttggccctccttgcggttttaactcccgtaaatgtttgtatagcgtggcgcgggcaagcgctaatgtgcttattaatttaggatgatgtgcatagggagctacagattgattaaatagcatttcacacaattgatgaagtttgtctcgtaaatcagctattacctcatcagcctgggaaaaattaacattcgccagtacatcgggaattaataattcactctgtcgatagaaatgcctttctgcagtctcatgaacagagactccggcccctttgaagtctttatttttaaacccttctgcaaaggtatataacgccttgcgtaaggctgttttatatcccaaaccaacagtcactatttcgtttatcacattgccgtattgttgccacccctgattaaacatcaacacatcatgacgccgttcaagaatagatgcttgattattacgatatccccccataatcaattcaagaggactttgcggcgcaatatttctgaattgattcacaaccgccgccacgcgatttccattttcattttgaataatcttatctaccacaactcggctgatttgtgtccaacttggtgcggaggtggtgaaagcaagaaatttttcctcaacctcccctttcttgactgttaccagacaaggggaatgcggatggggccatagcccattaactgtaaaggtaaatttttccttaagaaaaccggtataacgcaaattgctttcctgtccacagcaagaacatttaccaatcccaatgggatcgcataattcaatatgcgctggttgccagaatagaccacggacaaacccaatactgctagcaggtatagactcattggacttgataggtttaatccaggtaggttggttttccgtatgactttcattaggaaattgtttttgaagacgaggtaatgtgaggacattgagtaacaccgtactacgaagatcgatcccacgtacgaacgttgttacaggtgttcctccacgtaaaccgcttttaaaaccaccaccaaaacctggtgcctgattcgcctggttgaataacgcaatcgcagtgcatccaccacataatgcttcaccctgccccggttgattgacaaatgcacaattcgtcgcgccgcttaccccagccaacagtttttccattggagtcacatcatttgctttgacacctttggtctgcataaagggatgttctgcgtgattaaggtagaacatatctatccacggcgcgatgagttgttgaaactcatcttcagtgagcggattcattatgcgatgtcgaaattcaacgtcatcttttgccggggcgataatttgcccaatgcaaaccagcagtgctaaagcggccagttccatatcgtcacggggcaaacttaatcgccactgatctctactgcagtataggctttgcagatttatgatttggactttccccccgtttcgcgggcgtacagggatccagttatcaataagcaaattcatttgttctccttcatatgctccgacatttctcctgcatttctatacgtcggcacacttccgttatcggtaaaaacaaagaaaaaatacggcgtaattaattcaataatcacattcactgcaaaaatatattcattggtttaatacaattaacctatacatatattaagatgtgttgaattgtttaaagacaataatgcatgcatttcaaatctgcaagttattcgttttattattaaagaaacttttagttataataattaccatgaattttattacataaaatattcatactgtgaatataaaatctcataccgggaaattaaaagaagatgtacattgtgcaccttccctacttaagtagggataaaccgttattggtcttattatcgtcattgataacaatcattcccgaagttatttgggatttgcagggatgactctggtcatcccttcatcccctgtataggtaataacaatactgttaccctgccagacccatccatccagattctgtttcccttccagccaaagtaacccatcttcatctactacttcagaaaaactacgtttccaggtgaagggtacattgacgcgattaagtgcaagcgcctcatactgctgttcatgacttaggtcctcgtagacctggccatcgagcagttgtttaccactagacgtttgtacataaggcaataatggcaggctcatttccccatccctcgttaccgcaagaatggtttcatcgttatcctgcaagctatattcttcagcccactgcaggaccttgcgagccttgaaccttttttcacactcggcgctttcaaatttatccatgccattgccgacccattctggctcatccatttccgcatcatcgtaaatgctatccagccattgccggtaagcatcagggaaaaataaggatgctccattaagcccctcaatatgttgctgcgtccgccacatgactctaacgttgctataaatatgctcatgtcgtccgtaaccctcgccatcaggcagcaaaatggtggcaacaggaatctcaaaaccagcgggacgatatttgcgatgatggcgatgtaaacggcccaatcgttggaaaagcaaatctgcaggacaatgctgagtaattaaccaatcaaaatcaacgtcgagactttgttccacgacctgggttgcgacaagtatccgtccaacatttcgcttcccatttttgccgaaattgctaataactcgattctctttttcacgacgatcgttcagcgtaaagcgcgcatgaaacaaatctatatctacttgcgtgttatttagctcctttagccgttggtagcatacttgtgcaacgtcaaccaaattgcaaataagacagacctgtgcacccgcgtttgccgctgcgatcattcgctctaacatcgtaaggtcaggtaacatgtcagctaaacaaataggttctggctgaatgctaaagcggggcgggagttgttctggatgagctagcagatcaaaacgttgcgcaccattcacacctcgccagttaatgagtggatatgcggagttattttccactggatctgtatgcagaccataagtatccagaagtttctgtttttgtttcattggtagggttgcggaaagaagaataacactccctcccacatcagcctgagccttgagcactgcctccagcaagccgttcatataggtgtcgtaagcatgaacttcatcaacaattaaaacacttcgaccaattcccaaaccacggataaagcggtgtttaactggcaatacgcttatcaacacctgatcaatcgtgcaaacgccgatttgcccaagaaacactttcttattgctttgactcaaccactgacaacactgaacccacgcttcttcttgcccctgttcagtaatcgcgcgactttttatactttgaaagaggtggttaaaccgactattgccatgagcaagaataagatttggggaactaaataagtggctcgcgctcgcttccattctcgtaagcatagcattcgcggtagcttgtgttgggagggcaaaaataacactatccgcaatttgttgatcaataagtttccaagcataggccagcgctgtttccgttttaccggagcctgtaggtgcctctattaccgtcagcccgggagctactggaagagcatcaactaacacctgtaattgtctgggttgatagccattgtccagtagtgcatgaacaccttcataacatcgcttattacttacaagtccactcaactccaatacccggctcgcatcctgctgtcggtcctggaaatacgttctcagagcatttatgtcggaaggcgcatcctcattaaacagaaaggtattcgttgtagtccaggagcctaaccagtcagcaaggctgcaaaaacctgctaacagactactacaatcaggtggtatatcgtttatagataaccccgctggcgttaaaaataatgcttccagtacagatatccactcctcacgagcctgtttatcttgcgcagcataagatgccagagaagctggcatttcccaacggctcttatcttgatcctgggaatgtaatataaaaccatgatgtcctgtaacggcctctacccatggaaaccaggactcataaggatgaggagcggcatcaaaaaaactgaaaaaatccccgagagattgctcactaagactatcctggttaaaccaatacagaccggctgcaccatgattaaatttacggcacatttgtgtacttggaccattaagacttggcgttgcaggatttaatttcagccaactttctgcacttttatattggaatcgtatatcaaactttccaatatcatgaagagcaatgaaaaataacagccaggccttcaccctctgtttacttagcatttcatttcggcaaaaagtattttgcagtacgacactttgatcccaccagcaatctgcaacagcagcaacatcaaggcaatgataaattaacagatgaatatcatttcctttcgtcaagcttttactggattttccccagtaatggcatatatatttaaaaggttccattaatagcctccctgtttttttagtattatcgatgatatcagcgggctatttttcgatgctgctcataaatatcgaattacagtgatatacacatgtcttgcctccctgcaaagaagagactaacattcgaattgtttgggttcgaacgctggcctcaggttgatagaaatatcgcctggggcttttgtccatctggaacctcgcgaatgcttaacgccagacagcctcaagcacccgacgccattctatacctgataattcttcccgcggcgttcacgtttaaaatcaggaatgctgctcgcaaaataaaaacgcccccatcatttctgacagaggcgtttaatttgtccggcaatatttacccttcgtgtaacccacattccctttttaagccaaagaaacgcgtttcttcttccgccatgccgggttcccatttacgggttgtatgggtatcgcccacgcttaaatatccttcatcccataatgggtgatatttcaggccatgtttttgcaggtactgataaatagttcggttatcccagtcgataatcggcagcactttaaatacgccacgctgaattgccagcaccggtaaattggcacgactgccggattgttcacggcgcaggccagcaaaccaggtttgcgcattcagttctttcagagcccggttcatcggttcgactttgttgatgtcattgtacttttcaatgccttcaacgccctgctcccacagttttccgtagcgtgcttcctgccaggctgcgctttcggtagcacggtacactttcaggttgagcttgagtttgtccgttaactcgtcaataaagcggtaggtttccgggaacaagtaacccgtatcggtgaggatcaccggaatatccgggcgaatttgattcaccagatgcaggctcaccgccgcctgaatgccaaagctggaagaaagtacatattcaccgggcagattatccagcgcccaggctacgcggccttcagcgtccagtttttccagttcggcgttagtttccgccagcgccagaatgcgatctaccttcggcagttcgttcagggcgtttagatcgagtttggacatagattcctcactgtttgccttgcctgatgcgacgctcacgcgttcttatcaggcctacaagaccgggctgatggttaatcccacaaatcacgcgccggatcgagcaccgggcgaatgatgcccgcacgcaccgtaaagtcgccgaagccttcacccgcttcgcgctctttcgcccagcgccctatcagttcatcaaggctcgccaggatttccggctcggtgatgttttctttatacatccgtgggatacgtgtcccaatgcggttgccgccaagatgcaggttgtagcgacccggcgctttacccaccaggcccacttccgccagcatcgcgcgaccacaaccgttcgggcagcctgttacacgcatcacgatatgctcatcgctgacaccatgtttcgccattaaattatcgatgttgtcgataaaagacggcaggaaacgctctgcttccgccatcgccagcgggcaagtcgggaaactcacgcaagccatgctgttttcacgctgcggcgtgacggcattcattaacccgctctctttggcgatcttctcgatcttcgctttctcgctttccggtacaccggcgatgatcagattctggttcgccgtaatgcggaaatcgcctttgtggatcttcgcgatctccagcaggccggttttcagcggacgcgccggataatcaaggatgcgaccattttcgataaacagcgtcaggtgccagttatcatcaatgcccttaacccagccaatacgatcgcctcgtccggtgaactcatatggacggatcggttcaaatttgatccccgcgcgacgctccacttccgctttaaacgtctcaacccccacgcgctccagcgtgtatttggttttggcatttttacgatcggttcggttaccccagtcacgctgagttgtcacgacggcttcggccaccgccagcgtatgctccagcggcagatagccaaactcactcgcggtgcgggcgtaggttttcttgttgccgtgttcgatggaaagcccaccgcccaccaacaggttaaagcccaccagcttgccgttttcggcgatcgccacgaagttcatgtcgttggcgtgcagatcgatatcgttctgtggcgggatcactaccgtggttttgaatttacgcggcaggtaggtctggccgaggatcggttcttcatcagtagtggcgactttttcctggtcgagccagatctccgcatacgcgcgggtacgaggcaacagatgctcagaaatcttcttcgcccactcgtacgcttccgcgtgcagctggctctcgtaagggttgctggtgcagagtacgttacggttcatgtcgttagctgtcgccagcgcatcaagaccgacgctgtgcagcatctggtgcaccggtttgacgttctttttcagaatgccgtggaactgaaacgtctggcggttggtcaggcgaatgctgccatagatggtgttttcaccggcaaatttgtcgatcgcctgccactgtttagtggtaatcaccccacccggcagacgacagcgaagcagcatcgcgtggcgcggctccagcttctgttcagcacgttcggcgcggatgtcgcggtcatcctgctgatacatgccgtggaagcgaatcagcaggaagttgtcgcccttaaagccgccggtcagaccgtcgtttaaatcttccgcaatggtgccgcgcaggtagttgctttcatgcttcatgcgctcggcgtctgtcagttttccttcgaccactaaaggccctggatgtttttcgctcattagtagacatctcgctgataacggcgctctacgcgcagctcacttaaaaattcatccgccgcttcggtgtccatgccaccaaattcggcaatcacttccagaagtgcctgctcaacgtctttcgccatgcgattagcgtcgccgcagacataaatgtgggcaccatcattgatccagcgccacagctccgcgccctgttcgcgcagtttgtcttgtacgtaaactttttctttttgatcgcggctccaggcaagatcgatacgtgtcagcacgccatctttgacgtagcgctgccactccacctggtacaggaagtcttccgtaaagtgcggattaccaaagaacagccagtttttacctggcgcttcgtcggcggcgcgttgctgcataaaggcgcggaacggcgcaataccggtgcctgggccaatcataatcaccggggtttctggattggctggcaggcggaagttatcgttatgttcgataaatacgcggacttcgccctcttcttccacgcggtcagcgaggaagctggaggcaccaccggcacgggcgcggccttccacgtcgtaacgcaccacaccaacggtgacgtgtacttcgttctcgacttccgcctggctggaggcgatggaatacagacgcggcgtcagcgggcgcagcagattaattagcgcttcggcatcaagctgtgccggggagaaacgcaccatgtcaacaatcggcgtcgtcgcggcgtaatgctgtaacttcgctttatcgcccaccagcggcagcagtgtttcactgcgggtaagcgtggcgtaattctcaacaatgttggcggtgttgacggtcagttcgaagtgccactgtagcgcttcgttcagaggcaacgttttgccctcgacggtgacaggttcatcgcctttcagccacagcagttcgacaagttctttcaccagtgccggatcgttctgataccagacgcccagcgcgtcacccggctggtaacgcatgccgctgtcacctaagtcaatttcgatatggcgaacgtctttttcagagttacgcccggtaattttctggttaacagagaggctagccaccagcggcgcgtctttgctgtacgggctggtgtggatttcatttaccgcgccagtagcgacggattggctaggtgccgcgacaggcgcacggcttttaagcgcatcaaccacgcgggcgcgccactcgctggcagcagcctggtattcaacatcggcatcgacacggtcgagcaggcgttcaccacccagttccgccagcttgctgtcgaaatctttcccggactggcagaaaaattcataagagctatcgccgaggctaaacacggcaaacgcggtgttttccagctttggcgcttttttggagaacaggaacttatgcagcgcgacggcttcttccggcggttccccttccccttgcgtactcgtcactacgatgagcagtttttcgctggcgatttgtttgaatttatagtcgcccgcgttcaccagcttaacgttcagttttgctgctaataaatcatcacgtaatgcttcagcaacccggcgcgcattgccggtttggctggcggagataatagttatacccggcatttctgcggctggcgctggcgtcgctgcaagcgcagcaggctgctgattgagtacgccccagaaatagccagaaacccaggcaagctgggtgggagttaaatcggtcgtggccgcctgaaggcgtgccagttgctccgggttcaacggaagcaacgcggaaggtgggacctgtgtcgtcatgcgtcgttatgttccagtaagcaaagctgtttctgcgccctgtcagcgcccataaaacagaagagaaggtaaggttaacggggcaaacggtgtggattaaagacgggatagcgataactaataaccaaatcgactaacctgttttagcaatagtctttaacaacaaaatagattaaccaacctaatgaaaaacaaatgaatttagccaatcattaagataaatcagcgattttgcgcaacaaagtcgttttagataatgcgaaaaaacagcctttccggtactctacggcggttttatcgtcctgtagagaaattatgatgtccaccacgttatttaaagatttcaccttcgaagccgctcaccgcttaccacacgtcccggaagggcataaatgtggtcgcctgcacgggcattcctttatggtgcgactggaaattaccggggaagtcgatccgcatacgggctggattatcgatttcgctgaactaaaagcggcgtttaaaccaacctacgagcgcctcgatcaccattatctcaatgatattccaggtctggaaaacccaaccagcgaggttttagcaaaatggatttgggatcaggttaaacccgttgtgccgctgttaagtgcggtgatggtaaaagaaacctgcaccgcaggttgtatctatcgcggcgaatgataagagtgtgtcggcggtcaatttcccttaagtaacgctatgttagggtgttgtgttctggatatctggggcatgacatggaagacgactgcgacattattattattggtgccggtattgcaggcaccgcttgcgcgttacgctgcgcgcgagcgggtttatccgttttgttactggaacgcgctgaaatccccggcagcaaaaatctttccggcgggcggttatatacccatgcactcgcggaactcctcccgcaatttcatctgaccgcgcctcttgaacgacgcatcactcacgaaagcctttccctgttaacgcccgatggcgtaacgacgttttccagcttacagcccggcggtgaatcctggagtgtattacgtgcacgattcgatccgtggctggttgccgaagccgaaaaagaaggtgtcgaatgcatccccggagcgacggtggatgcactgtatgaagaaaacggcagagtctgtggcgttatttgtggtgacgatattctccgcgcccgttatgtggtgctggcagaaggtgccaacagcgtcctggctgaacgtcacgggttagtgactcgtcctgctggcgaagcgatggcgttggggatcaaagaagtgctgagcctggaaacatccgctattgaagaacgttttcatctggagaataacgaaggcgcagcgttgctgttcagcggcaggatctgtgatgacttacccggcggcgcatttctttatactaatcaacaaacgctcagcttagggattgtttgcccgctctcttcccttacgcaaagtcgtgttccggcaagcgagctgctgactcgctttaaagcgcatccggcagtgcgcccgcttatcaaaaacacggaaagtctggagtatggtgcgcatctggtgccagaaggtggcttgcacagtatgccggtgcaatacgccggtaacggctggctgctggtgggcgatgcgttgcgcagttgcgtcaataccggaatttccgtgcgcggcatggatatggcgctgactggcgcgcaggcggcggcacaaacgctgataagcgcctgccagcaccgcgagccgcaaaatctgtttccgctttatcatcacaacgtagagcgcagcctgctgtgggatgttctacagcgttatcagcatgttccggcgcttttgcaacgcccgggatggtaccgtacgtggcctgcgttaatgcaggatatttcccgcgatttatgggatcagggtgataaacctgttccaccgctgcgccagttattctggcatcatttacgtcgtcacggcctgtggcatctggcgggcgatgttatcaggagtctgcgatgtctgtaacgtaagatgttatcaggagtctgcgatgtctgtagcccgtaatctctggcgcgttgctgatgcgccgcacattgttccggctgactccgttgagcgccagacggcagaacggttgattaacgcctgtccggcaggtctttttagcctcacaccggaaggtaacttacgtattgactatcgcagttgcctggagtgtggcacctgccgtttgctgtgcgacgaaagtacactacaacagtggcgctatccgccttccggattcggcatcacctaccgctttggataaataataaggataatttatgcccctcttacacctgctccgccagaatccggtgattgctgccgttaaagataatgccagcctgcaactggcaatcgattctgaatgccaatttatttccgtgttgtacggcaatatctgcaccatcagtaatatcgttaaaaagattaagaacgccgggaaatatgcttttattcatgttgatttgctggaaggcgcgagtaataaagaagtcgttattcagtttttgaaactggtgaccgaggcggacggcattatcagtaccaaagccagtatgttgaaagcggcaagagcggaaggttttttctgtattcatcgcctgtttattgttgatagtattagctttcacaacattgataagcaagttgcgcaaagcaatccggattgtattgagatcctgccaggctgtatgcccaaagtgctgggctgggtgacagagaaaatccgccaaccgctgattgccggtgggctggtgtgcgatgaagaagatgcgcgtaatgcgattaacgcgggtgtcgtggcgctttccaccacgaataccggggtctggacgttagcgaaaaaattactttgacgggataatcgtaaccaattgaatttggtttgatttgtaggccgcacgccacatccgacattcagcgcctgatgcgacgcttgacgcgtcttatcaggcctacaagtccccaggccagaaccgtaggcaggatcatccggcaacacgttattggcaatctgcgtgaatgtttgtcaccagtgcctccagcaccactttccagtcatcaaccacgccaacatctgcctgactaaataccgcagcgctggcgtcatgattaatcgccaccacaaacttgctattgcgtacgcccgccattaacgctgctgcgccagaagcgccaacaacaatacacacctcaggtgccagcagatgtccggaaataccaatcactttttcagcatcaacgccaccgttcatcactcgcgcccgactgtagcccacttcggctcccagcttttctgccagcatagcgatttcctggttatctgcctctccgccctgccccaccaccagcacccgtctggcctcagctaatgggtcgcgggtaacatttttcagatcctctgtgctaaccagccagtccggaagcgcacccgggacaatgttcagttgttgcattccagagggcaacgtggcgtttttcgctgctcccgcctgacgcgccagggaaaggcatagcgggcgtttttctgtttgcagcgtcgccgttagcgcatttccccagtgggatttgcgcacgcttacggttggaatatctaagctagtcacctggcagatgcttgcaccatgtaaacgccaggccagccgggtgctcagttcatcgccaaacgttcccggcggaaagagaacaacgtccgcaggcgttcgctgccactgttccaccaacgcatccagcacctgttccgccactacaggctgaggttcaatctgccagtgcgccagggtacaaccgctgaaatcctgcgccgccagccagcttgctattgcggcattctcctgatttattgtcacaattgcgatattcatggctgcatcctttggcgtaaatagtcctgccatagcttttgagctttttctgctaccgtttgcccatcaatcagcgtcgctccgcgtcgttgctctgctcttgccagttgcagacactgcatcgctggcatttcggcagcaacagttttacggataatttctgctttccccgcagccattcgctggcgcattcccggtactggcaaggccacttcaccgcactgacgcacggcaatcaccgcaggcaagcgaacccggcaacaacgcaacccatgttcagtacgctgttcgagggtgataaacagcgcgtcgagagtgaaacgctccacctgggtgaagcagggccagcccagcatttccgccagcaaaaatggcgtttgcccattctgcccttcgctgctttggcagccggtaattatcagatccagcggattctgatgctgccattcggcaatatggcgagcgacaaattccggcgcaaagcgcagatctgccgccgtctccagcaatacagcttcctcaaacccaagagccatgagatagcgcagccagtgcaatgcccgttcatcccccatgctcaacgcggttaaagacatcggcgtaccgttttttctctgcgccaacagcagcgcggcagcggcctgttcatcagcaccgagtaaacttcgcagtaggctaatatccggtccgcttttaccctgagccgccgcctgccactctttttccgccagcattccggcatccggttcggctttaaacgctaacagaatgttcattcgcacctcctacatttcccgccgccaccagcgggagggctttagtttctggtgcccatagccaggtcacaacaaaaccaaccaacaacactgtcgccaggagcaataaggtgacttgcattccccactgcgccagcacccacggcagcaggccagtacttaccgccgcgccaagtcgactcatggcagtggcaaaaccgacgcccaggctgcgaatgtcagtaggaaaactttccgcaggcaaaatgcccaccagattactgactgcgctaatggtggtgctgaagagaacaaaaagcagcagcgttaaactactgccggaaggcaaacaggccatgactaccagcgttgccgccagcagcaaaaaacttcccagcaaaaatttgcgatgtgccagcaggtgcgtcagaactaatcccagcagcgcgcccacaattaacaacgcattaagcatcaggctggcagtcagcgcatcttccagaccaatagtctgggcgatagttggcagccaggtataaatcacaaaccatgggattacgaggcagacaaagaagacgctgttaaacgccgtgcgccgccagtaacggctagagaacaaggttttgatgtgtttatgggtcgccgttaccacttcatcgcccagtaaaacatggggaccaaaatagcgatgcacgatagcgtgagcttctgcaaaacgcccctggcgcagtagccagcgtggactttctggcgttccccagcgtaataacgtaatcaacaacgcgggcagagctgcgcttgccagtagccagcgccaggcctccgggttttcggaaataaagtgatgtccggcaatacttgccagcacatagcctacggtccacaccacgctgaatgcgcccagcaaaataccgcgatggcggcgcggggaaaattcagccagcaaggtgtgacctacactataatcgcctcccagaccaatgccaatcaaaatgcgcagtccaataagatgctctggcgtggtggcaaaaaattgtaaaaagctagcaagcgtaatcagcaaaaagctgaaggtgaagattttttgccgaccaatatggtcggagatccacccaagaaccaggctgccaaggaacaaaccaaggagcgcgctgccgccgatcattcccgccataaacggcgtcagttgcatggcgggcgtaagctgaataatggcgtaaccaatgacgccgagaacataaccgtcggtcaggtgtgcgccgaaagtgagcgcagcaatgcggcagtgaaaacggttaagcggtaaatcatccattcgcaccggactagtgttcatctttaccccttcattgtccggtaataagaacggcttctcgcctgagaagccgaaaaggcaacgccccgtcatcgcggaacgctgcctgacacattatttttcaatcggatagatagtacccgtattcataatgccattaggatcgaactgctttttcagcccttccagcaacgcccacgcgctgccgtgttccagtttgctccagtgaacgcgatgtttaccgataccgtggtggtgcaccatgctaccgccgaggcgaatggtttcttcacagatgatcttgttgagcggattgtggtacttgtcgatttcctcttccggcttacagtcaacgacgttgtaatcgtagacgaagtacatgttggtgccgttctgatagctatgagaggaatgaccgcccagcatggtgatgtcgtcggcgtgcgggaactcagtacgaatacggttaataacgctttcgtagatttcgtggatgcagctccagcagccggatacttcggtggtaaagcccatgttgccggttttgaggatctgcacacgttcggcagccactttatccggtccccagttcaggttgttaaaccaggtttcgatcagcttgctgtccacgcgctggcattgcgggtagcgggcaacgatttccgcaatcccttcgcccgtcaccttcgcaatgcgagggttaccttcagccataaagatcagcacgcattttccgtcggcaaaatgggtgaagtgttgggtgccatcttcagcgtcatacaaacgagcgatactcggacgatacccttccaccatgatttcacgcaggatgttgaagccggttttcatgtcttccaggatatagccgtagaagaggttgttttccggggtgaatttaaagattttcactgttacttcagtgatatagcacaatgcaccttcgttgccgatgatgatgtgacgaatgtccgggccagccgcgcggcgtggcacgtttttaatgcgtgtgacggtgccatcagccaatactgcttccagaccaacgaccatatcttcgattgcgccgtagagtgtggagaactgcccgatacttcgggttgctaccaggccgcccatctgcgccagcggcttactctgcggagaatgccccgtggtgtaacctttttcacgcaacgcgttttccagcacttccagcggaacaccacattgcgccgtcgcctgcatattctcaatatcaatattaatgatttgattcatggcggagccgtcgagcaccacgctgttttctacaacagtttccagcccaccttcggtggcggaagcaccggtacgcggcacaccgttaattttgtgcgcattcataaaattcagcacacgggatacttgctctgtggaaccgagttttacgaccgctgccggaatcggcaaagtataaatgccatgaatatccggaaatttacgaaaacggtcaatactgtttttctttaatactgtttcatcggtaattacgcgatctgcaccaacaatttcctttagctggtcgacaatcgctgcgcgagataaagacatagtaattccttcctgataataaaaatggaataatcattaataagagaaaacagaaaccaccgttatgggttagcgcactaaataaccgccatcaaccactaataaatgcccgttgacataattgcttgccggacttgcgaggaatacggctgcgcccattaaatcctgagtatcgccccaacggtttgccggaatatgatcaagaacgcgctgattggtttctggattactgcgtgtcgccagcgtaatatctgttgcataatagccaggggcgataccatttacctgaatattatattgacctagttcatcacaataagctttggtgaacccggcaagagcatgtttagtggcagaatatgcaggactccattgtccacctaagtaagagaacaaactacagatattaataattttgccgcttttctgcgggatcataatttttgcagcttcatagcttaactcgaatgcggcggtcaggttcacatcaatcatcggatcccagtcggcacgaccgaagtccagcaccttattcagcttacaaataccggcattgttaaccagaatatcaactgtaccgaaacgctcacagcaagcagcgataatcttctgcggcgcgccttctgcggtgatacccacctgcatgaagtccacctcaacaccctgtttttcaatcatttcctttgtttcgccgttatctttgacgaaactaggaataaagatatttgcgccagctttggccaacgccatggcaaatgcctggcctaaaccgctattcccaccggtaacaattgcggttttacctttcagggagaaaaaatccatactgaacgcattgagagattcgatactcatagttagctccaatttccgtaaggcaaaaaaaaagaaaggtaacttcccccgcgagagggaagttacctttctcattatctctggtaactggagataatttttagcataagggcataactgctaatgtgatcgtaatcacagtgtgatattcgtattgtcaaataattttaaaaagcagaagcgtgattactctcacacaacacctctgctttccatgttatttattatttcaattactagagacctgagaaaagtaatccacctgaaagggcggcttacttttctcttttttttgtctattacaaatgggaatacgatatgcaacacaacagttatcgccgttggataaccctcgcgataattagttttagcggcggcgttagtttcgacctggcttatttacgttatatttatcaaattcccatggcgaaatttatgggattcagcaataccgagataggtttaataatgagtacctttggtattgcggccattattctttatgcccccagcggcgttattgccgataaatttagtcaccgcaaaatgattacttccgcgatgatcattaccggattactgggtctgttaatggcaacgtatccaccgctgtgggtaatgctctgtattcagatcgcctttgcgataacgacgattttaatgctgtggagcgtgagcattaaagctgcaagcttgcttggcgatcatagcgagcaagggaaaattatgggctggatggaagggctgcgcggcgtcggtgtaatgagcctggcggtgtttaccatgtgggtcttttctcgctttgcaccggatgacagcaccagcctgaaaacggtcattatcatctatagtgtggtttacatcttgttggggattctgtgctggttttttgttagcgataacaacaacctgcgcagtgccaataacgaagaaaaacagagtttccagcttagcgacatcctggccgttttgcgtatcagcaccacctggtattgcagcatggtgatttttggcgtcttcaccatctacgccattctgagttactccaccaactatctgaccgaaatgtatggcatgagcctggtggcggcgagctacatggggattgtgatcaacaaaatattccgcgcgctgtgcggcccacttggcggcataatcaccacctacagcaaagtgaaatcccctacccgcgtgatccaaatcctttccgtactcggcctgctgacgttaactgccctgctcgtcacgaactctaacccgcaaagcgtcgcgatggggattggcctgattttactgctgggattcacctgttacgccagtcgcgggctgtactgggcctgccctggcgaagcgagaacaccgtcttacattatgggcaccacggtaggtatttgtagcgtgattggattcctgccggatgtcttcgtttacccaattatcggccactggcaagacaccctgcccgctgcagaagcctaccgcaatatgtggctgatgggcatggcggcgcttggcatggtgattgtctttacctttttgctgttccaaaaaattcgtactgctgatagcgcccccgcaatggctagcagcaagtaagccaggaaaattacaggagaaaaatcatgagcaaaaaatacatcatagggattgatggcggaagtcagagcacaaaagtggtgatgtacgatctggaaggtaacgtggtttgcgaaggcaaaggcttattacagccgatgcacacgccagatgccgatactgcagaacatcctgacgacgatttatgggcaagtttatgttttgccggtcacgatttgatgagtcagtttgccgggaataaagaagatattgtcggtattggtctgggatccatccgttgctgccgtgcgttattgaaagccgatggcacgcctgctgcgccgttgattagctggcaggatgcacgcgttacacgcccttacgaacacactaaccctgacgtggcatatgtcacctcttttagcggttatctgacgcatcgcttaaccggcgagtttaaagacaatatcgccaactattttggtcagtggccggtggattataagagctgggcatggagcgaagatgctgcggtaatggataagtttaatatcccccgtcatatgctgtttgatgtgcaaatgcctggcaccgtcctcggacatatcacaccacaagccgcactggcgacacatttcccggcaggactgccggttgtttgtaccaccagtgataaaccggtagaagctctgggggccggattactggatgatgaaacggcggtaatttctcttggcacttacatcgcattgatgatgaacggcaaagcactgccgaaagatccagtagcgtactggccgattatgtcttctattccgcaaacattgctgtatgaaggttacggtattcgcaaaggcatgtggacggtgagctggctgcgcgacatgctaggcgagagcttaattcaggatgccagggcgcaggatcttagtccggaagatttactcaacaaaaaagcttcttgtgtgccgccaggctgtaatggtctgatgacggtgctggactggctgaccaatccgtgggaaccgtacaaacgcgggattatgatcggctttgattccagcatggattacgcatggatatatcgtagcatactggaaagcgtggcgctgacgctgaagaacaattacgacaatatgtgtaatgaaatgaatcactttgcgaagcatgtgatcattactggcggcggtagcaacagcgatctgtttatgcagatttttgccgacgtgttcaaccttccggcacgacgtaacgccattaacggttgtgcaagcctgggggcagcgattaatacagcggtaggtctggggctatacccggattacgcaacggctgtcgataacatggttcgcgtgaaagatatctttataccgattgagagcaatgccaaacgctacgacgcgatgaataaaggcattttcaaagacctaaccaaacatactgatgtgatcctgaaaaaaagctatgaagtgatgcatggggaattggggaatgtggatagcatccagagctggagcaatgcgtaagtgaggaaggccgggcgggaaactgcccggcctgaacatacctgaatggttatccccgctgacgcggggaacataagttcgacaacttaaaaaatgataacaagtccggtttatccccgctgatgcagggaacataataaaaactttaactagttcggtttatccctgtttttacaaggaatattaactacactcgatgtctttagaataaaagacaatacgaatcgcactttatcaattttcacttaaagtatgaactggatatctttattcataagaactattcatcaacagcgtatagaggcggttatgtaaaaccactcattagcctcaaaacaaagacaaacttccagatttattacttaaccaatgaataacaagcttaaaaaatatactgttattctaaagaaaaaattaacaggcattaattcaatattaaaaaaataatagattaaaatttcttaacgatttaagaatcatacaaataacactttgattaaatttaattttttgtatcgataattgtgaacctctctggcatggagaactattttgaacatgaggtgttacgtggatatgttgcttattacaagtactgctaatataaaaacttgagaaagagataacgggttatatggtggtttatccccgctggcgcggggaactcgacagaacggcctcagtagtctcgtcaggctccggtttatccccgctggcgcggggaacacctgttttcgcaaatctatggactattgctattcggtttatccccgctggcgcggggaacacgggcgcacggaatacaaagccgtgtatctgctcggtttatccccgctggcgcggggaacactggctctgcaacagcagcacccatgaccacgtcggtttatccccgctggcgcggggaacacgaaatgctggtgagcgttaatgccgcaaacacaggtttatccccgctggcgcggggaacacattacgcctttttgcgattgcccggtttttgccggtttatccccgctggcgcggggaacactctaaacataacctattattaattaatgattttttaagccagtcacaatctaccaactttatagtatcacacaaacaacacatccattatgttaaagagcacttaatccattgattaaaaaggtaaatatttaaaataactctatacaaactaaaatctaccaaactttaccgcaataattttcactccagcgaaaaattaatgccacagaatttgtagagaatgctaatgattagccctggatgggtaaaatggaggagttttcagaggcgacaaacaatataaatgagtagaagtctttacaggttccacccatttataacgcttataaatgtttaatcaggcaatatttagatatttatgtgtttgcatgctcaaacgccaattacgcgcaatgcaggtttcaatgcacaaacgtgtggcatcatccttttggctaatcggctgcagtgcaatgactcgcggtttatcatcggtcagcgttgccagtagttcatccagtgcttcaatatcgcgtacgcgccccactggatgcttgatttcgttggctcgctccagtgcctgactcaacacttcatagccgccgcgcatgttcagctttgggcttacggtaacccaggtattcggtgtgcagcgtacctcatgagtaccactggtttcgatctggcagctaaaaccgttcttttcgagcagatcagtcagtggcagcaaatcatgaatgcaaggctcaccacccgtaatcaccacatgccgcgcggtgtatccctggcgaccaatgacagccagcaaatcttcactgctcgcagccccccacttatcactctctttggtcttcgccagaatgctgaaaagggagacttcccgatcctcaagcttttcccaggtgtgtttggtgtcgcaccaggcacagccaaccgggcatccctgtaaacgaataaaaatggcgggaacgccggtaaagtaaccctcaccttgcagggtctggaacatctcgttaatcgggtactgcatagcattctctgtgaagtggataattgttaattattgcagatcctgccacaacaatcatgtcttattaacattctgttacaggcaggtttaaagaaaaatgcgaaacatatcgttaataattaaagggagtaacgtattatgtcagaagaaaataaagaaaatggatttaatcatgtcaaaacattcaccaaaattatatttattttttctgtattagtttttaatgataacgaatataaaattaccgatgccgccgtcaatttatttatccagatttaatgagaaatttataatgcgctatttcatactaatgttcactttcgtatgttcctttgttgcagcccaaccaactattgtcccacaattacagcaacaagttacggatcttacgagtagcttaaacagtcaagaaaagaaagaactgacgcacaagttagaatctattttcaataatacccaagtgcaaattgccgtattaattgttcccacaaccaaagacgagacaattgaacaatatgctacaagagtttttgacaattggcgtttaggagatgccaaacgtaatgatgggatactgatcgttgttgcctggagcgatcgcactgtccgcatccaggtaggttatgggctggaagaaaaggtaaccgatgctctggctggagatatcatccgtagcaacatgatacccgcatttaaacaacaaaaattagctaagggattagagctagctataaacgctttgaataaccaactcactagtcaacaccaatatccgactaatcctagtgaaagtgaaagtgcgtcttccagtgatcattattactttgctattttttgggtatttgcagtgatgttcttccctttctggttttttcatcaaggcagtaatttttgtcgcgcatgtaaaagtggagtctgtattagtgcaatctatcttttagatttattcctgttctccgataaaattttttccattgctgtattttccttcttttttactttcaccatatttatggtctttacctgtttatgtgtacttcagaaaagagcatctggtagaagttatcatagtgacaacagcggttccgctggaggcagtgatagcggcggatttagcggcgggggcggttcttctggaggtggcggcgcatccggccgctggtaactcaaccataaaaaatgccagcccggaggctggcatttttaaatcagataaagtcagtcttatgcctggcctttgatctctttacgaccgttgtacggtgctttttcgcccagagcttcttcgatacgaatcagctggttgtatttagcaacacggtcagaacggctcatagaaccagttttgatctggcctgcagcagtaccaacagccaggtcagcgatggtagcgtcttcagtttcgccagaacggtgagagataactgcagtgtagccagcatctttcgccatcttgattgcagccagagtttcggtcagagaaccgatctggttgaatttgatcaggatggagttagcgatacctttttcgataccttctttcaggatcttggtgttggttacgaacaggtcgtcaccaaccagctggattttgtcgcccagaactttggtctggtatgcgaaaccgtcccagtcagattcgtccagaccgtcttcgatagaaacgatcgggtactgtttggtcagttcttccaggaagtgagtgaattcttcagaggtgaacgctttgttgccttcgccagccagaacgtatttaccatctttgtagaattcagaagctgcgcagtccatcgccaaagtgatgtctttgcccagttcataaccagcagctttaacagcttcagcgataacagccagagcttcagcgttggaacccaggttcggcgcatagccaccttcgtcaccaacagcagtgttcatgcctttcgctttcagaacttttgccaggtgatggaaaacttcagaacccatgcggatggcttctttcacagttttcgcgccaaccggctgaatcatgaattcctggatatcaacgttgttgtcagcgtgctcaccaccgttgatgatgttcatcatcggaaccggcatagagtatttgcccggagtaccgttcagttcagcgatgtgctcgtacagcggcatacctttagcagctgcagcagctttggcgttagccagagatacagccaggattgcgttcgcgccgaatttggatttgttttcggtgccgtccaggtcgatcatgatcttgtcaatgccagcctgatctttagcatctttgccaatcagcgcctgagcgatcgggccgtttaccgcagcaacagctttggttacgcctttacccaggaaacgggatttgtcgccatcgcgcagttccagagcttcacgggaaccagtagaagcaccactcggagcagctgccataccgacgaaaccaccctccagatgtacttcggcttcaacagtcgggttaccacgggagtcgatgatttcacgaccgatgatttttacgattttggacattaggttttcctcaagtcactagttaaactgaaactccagacaaacaacgcgtacccagggtacgcgttgccgctctaacttttttacttacttcgcctgacgtttctggaactcgctggcggctttcacaaagcctgcaaacagcgggtgaccatcacgtggagtagaagtaaactccggatggaactggcaagccacgaaccacgggtgattcggaacttcgatgatctcgaccaactgatcatccccggaacggcccgcaacgcgcagacctgcatcttcaatctgtttcaacagcatgttgttgacttcgtaacggtgacgatgacgctcaacaattgtcggcgcattgtacagctggcgaaccaggctatcgtcaaccaactggcactgctgtgcgccgagacgcatggtaccgccgagatcgctcttctcgctacgaacttcaacgttgccgttttcatcgcgccactcggtaatcagcgccacaaccgggtacttacagtctggcacaaattccgtagagttggcgttctccatgttggcaacatggcgagcgtaatcaattaacgccacctgcatacccaggcaaatgcccagataaggaatattgttctcacgcgcaaaacgcgcggtcgtaatcatgccttctacgccacgatagccgaaaccgccaggtacgaggattgcgtccagacctttaaggatttcaacgccgcgcgtttcaacatcttgactatcgatcagtttgatgttgacgctgacacgattcttcagcccaccgtgtttcagtgcttcgatcacacttttataagcatccggcagttcaatgtacttgccgaccataccgatggtgacttcacttaccgggttcgcttcttcgaagataacctgttcccattcggacagattcgcttccgggcagtttaagctgaatcgtttacaaatataatcgtccagcccctgagatttcaacaggcccggaattttatagatggaatcgacgtctttcagagaaataaccgctttttccggaacattacagaacaatgcaatcttcgcacgttcgttcgccggaacagcgcgatcactacgacaaatcaggatgtcaggctggataccgatggagagcagctcttttacagagtgctgagtcggtttggttttgacttcaccagacgctgccatgtacggcaccagcgtcaggtgcataaacagagtgtgctcacggccaatttcaacagccatctggcgaatcgcttcgaggaacggcaaggattcgatatcacctactgtaccgccgatttctaccagtactacgtcatgaccttcgccaccttccagcacgcgctctttgattgcgttagtgatgtgcggaataacctgcacggttgcgccgaggtagtcaccgcggcgttctttacgcagaacgtcagagtagatacgacccgtggtgaagttgttgcggcggctcattttggtacgaatgaaacgctcgtagtgccccaggtccaggtcggtttcagcgccgtcttcagtaacgaacacttccccgtgttggattgggctcatagtacctggatcgacgttgatgtacggatccagtttcatgatggtcacattgaggccacgggcttcaagaatggctgcgagggaggctgcggcaatgcctttacccagagaggatacgaccccgccggtcacaaaaatatagttcgttgtcatgctgaacctgagaagttaggttgaaaagacgatggaataaccaagacgggaaagcagtatacccgaacatgacctgtgccacaaactttcattatccctcctcttcgccagcgcactattgaaatcaggagtgagaaaatagcccctttggggtaaatgtttttgacgcaaatcaagcgcttgtcatttaaaaaatgacacaaatggcgcttgaccgcgtaattcccttagagatcaatttcctgccgttttacctgttgccagacttcttccattgtttcgaggtcaacacctgtcatttccagtccacgcgcggcaacaatacgctccacttcgcgaaaacgacgctcgaatttttcgttcgctttttgcaatgcgatttctgctttcgtccctaaatggcgagccagattaaccgtggcaaacagcaggtcccccatttcctcctccagtttagcctggtcgacaacagcctgccgcgcttcgtacatcacctcgtcgatctcttcgtagactttatcgactaccggaccaagcgtcgtccaatcgaagccaacgttggcgcaacgtttctggattttttgcgcacgcattaaagccggtaaactacgaggaatatcgtccagcgcgctatgctgcgctttctgcgcgcgctcttcggttttgatttgctcccaacgggcaagcacttcactactgttttcggcagaactatcagcaaaaacatgcggatggcgacgctctaatttatcgctaatagcagcgcaaatatcattaaagtcaaagcgcccttcttcctgagccatttgcgcgtaaaacaccacctggaatagcagatcgcccagttcaccgcgaagatcgtcaaaatcttcacgggcgatggcgtccagcacttcgtaggtttcttcaagggtgtaaggcgcaatggtggcaaatgtctgctctttatcccacgggcagccgttttccggatcgcgcaggcgctgcataatagtgagcaaacggtcgatttgattcattgaattgtcctgaaaattgcgggtctgtcaggtggaaacctgtgaccagaatagaagtgagttagtaacattacccaatcagtacgttaattttggctttaatgagttgtaattcctctggggcaactgttcctttcttcgttgctcctcttgcccgccaggcgatactttttacctgatcagctaacgctacgccatcacgttcctgaccggataaaacaacttcgaacggatatcctttactttgcgttgtacaaggaacacacagacacatacctgttttgttgttgtacatgaaaggactcaggacaacagctggacgatgtccagcttgctcgctaccttttgtcgggtcaaaatcaacccaaatcagatcgcccatatcgggtacgtatcggcttaccattaccagacttccttatctttcggctctccccagtcgatattctcgtggaggttttccggcgtgatgtcgttgaccagttcagcaagcgtaaatacgggctctttacgcactggctcaataattaatttgccatccaccaggtcaatcttcacttcatcatcaatattcagattgagcgcctgcattaacgtagccgggatccgcaccgccggactatttccccaacgctttacgctactgtggatcataaccctttcctcaaaccgctatcatatgtagatacagtatatatcaatctacattgtagatacgagcaaatttcggcttaactcccgtgcaaccgacgcgcgtcgataacatccggcacctggttgagtttacccagcacgcgccccagcacttgcaggttgtaaatctcaatggtcatgtcgatggtcgccagttgctgtttggtgtcgctacggctggcaacgccaagcacgttcaccttctcgttggcgagaatggtcgtgatatcacgtaacaacccactacgatcattagctaccacgcggaccaccaggctatatccggcggagtagctctcaccccataccgcgtcaacaatgcgttctggcgcatgggagcgcagttccgccagttgttcgcaatcggcgcggtgtacactaataccgcgcccctgggtaatgaagccgacaatctcatctccaggaatcggctggcagcagcgcgcgatgtggtgcatcaggttgccaacaccttcgactaccacgcgaccgttatctttactgcggttttgcggcgtgtagcttttttgctgaagttgcttcagcgcggcggcgtcctgctcttcggcactcggcttattaaattggctttgcaggaagttcaccatctgattgagacggatatccccgccaccaatcgccgccagcaactcgtcgacatcattgaagttgtaacgcggcagcagatgtttttctgcttctttcaggctgatccccagatgttccagctcgtcgtcaaggatttgccgcccagccagaatgtttttgtcacggtcctgtttacggaaccaggcgtgaattttgctacgcccacggctggttgtgacgtaaccgaggtttgggtttaaccagtcacggctggggttcggctgtttctgggtgataatttcaatctggtcgcccatctgcagctggtaggtgaacggcacaatgcgcccgccaatttttgccccgatgcagcggtgtccgacatcactgtggatgtggtaagcgaagtccagcggcgtacttcccgcaggcaaatcaacgacatcacctttcggcgtaaagacgtacacccggtcgtcaaagacctgactacgtacttcgtcgagcatttcgccggaatcagccatctcttcctgccacgcaatcagtttacgcagccaggcaatccggtcttcatgtccgctacgtgcgccgccagcagccgcgccctctttatatttccagtgcgcagcaacacccaactctgcatcttcatgcatctgtttggtgcggatttggatctcaacggtttttccacccggccccagaaccacggtatgaatagactgataaccgtttggtttcgggttagcgacgtaatcgtcaaactcatccggcaggtggcgatagtgagtgtgcactatccccagtgcggcatagcaatcctgtaaacgctcggcgacaatacgtaccgcacgcacatcaaacagctcatcaaaggcgaggttctttttctgcattttacgccagatgctgtagatgtgtttcggacgaccatacacttccgctttaacgccttcagctttcatctcagcgcgcagatgaccaacgaactcttcgatgtagtgttcgcggtcgagacgccgttcatgcagcagtttggcaattcgtttgtattcggttggatggaggtaacggaagcagtaatcttccagttcccatttcagttgtccgattccgagacggttagccagcggtgcgtagatgttggtacactcttttgccgccagtacacgttcatcttccggcgcatcttttacttcgcgcagatgagcaatacgctccgccagtttgatgactacgcagcgaaaatcatcgaccatcgccaataacatccggcgaacgttatcgacctgttcggaggaaacagaatcagtgtgcgtcgctttcagctggcggatcgccgccatatcacgcacgccgtgaataaggttaacgacgctcttaccgacgctctcacgcagcacatcttcgctgactacgttggcatccgccagagggaaaagcagcgccgcccgcagcgtgtcaatgtccatacttaatgtgctgaggatctccaccatctcaacaccacgccacaataacagactggcatccggatgcccctgcgtctgttgcagacaatacgcccaggtttcggctaagcactcacagctcttctggctggtaatacccagacttgcgatccatttttccggatcaaattcaccagccttattgatatgtgcacttcttaccgcaaccatcgtcctctcctttagggaccagacctgccgaaatcggcaaatcgcaattatttaacgcggctgaaaagtaccatgctttccagatgtcccgtgtgtgggaacatatccagcatcgccagtcgcgcaatggtatatcctgcttttaataacgcttcgctatcccgagccagcgttgcagggttacaggatacataaactatacgaataggttccagttttataatttgctgcataacacctgcggcacctgctcgcgccgggtccagcaacactttatcgaagccgtttttcgcccacggctgctttgtgacatcttcttcaagattttcgtgataaaacgtcacattctgtaagccattaagacgcgcattctgctggcctttttccaccagcgccggaacaccttctacaccgaccacactggcagcttgtgtcgccaatggcagtgtaaagttgcccataccgcagaacagatccagtacgcgatcttcaggttgcacatccagccattccaacgcacgcgctaccattttttggttcacacccgcattgacctgaataaaatcgcgcgggctaaaagttaagcgcaacccgttactgtcataccagggcatctcaccagagacggtttcgagtatctcactatcgggggcgagatacagatccaggccttcagaatggctaaagcgttccagtttttcgcgatctgcgctacttagcggtgcggtatggcgcaaaatcatcagcgtgccgctggttgcctgtaccagttcaacatgaccaagatggcgcatagcttgtaagctgcccagacatgccctgactttgggcagcaatgcttcaagttggggcgctaaaatggggcattgtttgacgtcgacaatgtcactggagcccgctttgcgaaaccccatctgaagttgctgtgttttcggtaagtagttcagacttaaacgcgcgcgacggcgatagccccagggaacatcggcgatcacttcagagacatcgtgtttcattaatcgggcgagtgccgcacttttgcttcgctgctgtaaatccacgctggcgtgttgttgctgacagccaccgcatacgccaaaatgaggacagcgtggcgtttcgcgttccgggctatcgcttaaccggcgtacgactttagcgcgggcatactgttttttatcttcagtaacagtaacttccgcgttttcctgcggcaataatccggggataaatagcgttttgccgttatgtcgcgccacgccctgaccaaaagagtcgaggtcgttgacactaacggttatgatctgacgcgtcgtcgtgcgtcgttttgcagagtagaattgcgccattggcgagactttctcaatttaacagtgtgaccttaattgtcccataacggaactccatgaccaactacagcctgcgcgcacgcatgatgattctgatcctggcaccgaccgtccttattggtttattgctgagtatctttttcgtcgtgcatcgctataacgacttgcagcgtcaactggaagatgccggtgccagcattattgagccgcttgcagtttctactgaatatggcatgagcctgcaaaatcgcgaatctatcggtcagttaataagcgtactgcatcgtcgccattccgatattgttcgcgcgattagcgtttatgatgaaaataaccgactctttgtcacctccaattttcatcttgatcccagtagtatgcagctcggcagcaacgtgccgtttcctcgccagctcactgtcactcgtgacggcgatattatgatcctccgcacgccgattatttctgagagttactcccccgacgaaagccccagtagcgatgccaaaaatagtcaaaatatgttgggatatattgcgctggagctggatcttaaaagcgttcgcttgcagcaatataaagagatctttatttccagcgtgatgatgctgttttgtatcggtattgcgcttatttttggctggcgcttaatgcgcgatgtaaccggtccgattcgcaacatggtgaataccgtcgaccgcatccgtcgcgggcaactcgacagccgggtggaaggatttatgctcggcgagctggatatgctgaaaaacggtatcaacagcatggcaatgagcctggctgcttatcacgaagagatgcagcacaatatcgaccaggcgacgtccgatctgcgtgaaacgctggagcagatggaaattcagaacgttgagttagatctggcgaaaaagcgcgcccaggaagcggcgcgtattaaatccgagtttctggcaaatatgagtcacgagctgcgtacaccactgaatggtgttattggctttacccgcctgacgctgaaaacagaattaacaccaacgcagcgcgatcacctgaatacgattgaacgtagcgcaaataatttgctggcaattattaatgatgttctcgacttcagcaaactggaagcaggtaagctgattctggaaagtattccattcccactacgcagcacgctggatgaagtcgttactctgctggcacattcttctcacgataaagggttagaactgacgctcaatattaaaagcgacgtgcctgataacgtgatcggcgacccgctgcgattacagcaaatcatcactaacctggtggggaatgcaattaaattcaccgagaatggcaacattgatattctggtagaaaaacgtgcgctgagtaataccaaagtgcagattgaagtgcagattcgggataccggcattggtattcctgaacgcgatcaaagccgcttattccaggccttccgacaggctgatgccagtatttcccgccgtcatggtggcaccgggctggggctggtgattacacaaaaactggttaatgaaatgggcggcgatattagcttccatagccagccgaatcgcggtagtactttctggttccacattaatctcgatctgaacccgaacattattatcgaagggccatccacccagtgcctcgcaggtaagcgcctggcctatgtcgaaccaaactccgcagcagcgcaatgcacgctggatattttaagtgaaacgccgctggaagtggtttatagcccaacgttctccgcgctgcctcccgcgcattacgacatgatgttgttaggcatcgcggtgaccttccgcgagccgctaacaatgcaacatgagcgattagcgaaagcggtaagcatgaccgatttcctgatgctggcacttccttgccatgcacaagtcaatgctgaaaaactcaagcaagatggtatcggcgcgtgtctgctgaaaccattaacacctacacgcctgttgcctgccctgacggaattttgtcatcacaaacaaaacacgcttttgcctgtaaccgatgaaagtaagctggcaatgacagtcatggcggttgatgacaaccccgctaacctgaaacttatcggcgcattgctggaagatatggtgcaacatgtggaactttgcgatagcgggcatcaggcggttgaacgggcgaaacagatgccgttcgatttgatcttaatggatattcaaatgccggacatggatggcattcgggcctgcgaactcatccaccaactcccgcatcagcaacaaacgccggttatcgcggtaacggcgcatgcaatggccgggcaaaaagagaagctgcttggcgcagggatgagcgattatctggcgaaaccgattgaagaagagcgattgcataatttgttgttgcgctacaagcctggcagcggtatttcctctcgcgtcgtgacgcccgaagtcaacgaaattgtggtgaacccgaatgcgaccctcgactggcaactggcactacgccaggcagcaggaaaaaccgatttagcgcgcgatatgctgcaaatgttactcgatttcctgcctgaagttcgcaacaaagttgaggaacagctggttggagaaaacccggaaggcctggttgatttgattcataaactgcatggcagttgcggctatagcggtgtgccacgtatgaagaatctctgccaactgatcgaacaacagctacgtagcggtactaaagaagaagatttggaaccggagctgctggaactgttggacgagatggataatgtcgcgcgcgaagccagcaaaattctcgggtaatggatgtcttgtcgagtagcaatcggctttttatgacgctggtttcagattggtgacaaagtgcctgtgtttatgccggatgcggcgttaacgccttatccggcctacaaaaccaattaaattcaatgaattaaaaaatgatgtagacctgatacatagcacaacaggctattttgcgtttagcatcagtctcaaaccggctccagatagagccggttttggttttctgtcttaacgcaccatgcacgggcgcttgttatcgaacgtccagccaggaatcagatactgcattcccatcgcatcgtcacgcgcgccaagcccgtgtttctgatacagctcatgggctttcatcacttgatccatatcgatttctacacccagccccggtttttctggcacctgtaccagcccgcctttgatctcaaacggttctttggtcaggcgctgattgccttcctgccaaatccagtgcgtatcaatagcagtaattttacccggtgcagcggcggcaacatgggtaaacatcgccagggaaatatcgaagtggttgttagagtgactaccccaggtcaggccaaattcatggcacatttgcgccacacgtacgctaccttgcattgtccagaaatgcggatccgccagcgggatatcaacggattgcagggagagcgtatggcccatttgccgccagtcggtggcgatcatattggttgcagtcggtagacctgtcgcgcgacggaactctgccatcacttcacgcccggagaaaccttgctccgcaccacacggatcttctgcataagccaggctacctttcaggtatttaccgattttaatcgcttcgttcaggctccaggcaccgttaggatcgagcgtaatacgcgcctgcgggaagcgttgcgccagtgccacaatagactcggcctcttcttccccggccagtacaccgcccttcagtttgaaatcgttgaagccatatttttcatatgccgcttccgccaggcgcaccaccgcatccggcgtcatcgcttcttcatgacgcaggcgataccagtcgcaactgtcatccggctggctttgatacggcagcggcgtggctttgcgattaccgacgaagaacagataaccgagcatttcgacttcgctacgctgttgaccatcgcccagcaggcttgccacgtttacccccagatgctgccccagcagatccagcattgccgcttctatcccggtaactacatgaatagtggtacgtaggtcaaatgtctgcaaaccgcgcccaccagcatcacgatcggcaaaagtattacgcaccagcgtcagaacgtttttgtattcacccagcgttttacctaccaccagcggaatcgcatcttccagcgttttacggattttctcgccgccgggaatttcccctacgccagtgtgaccagaattatctttgataatcacaatattacgcgtaaagaacggtgcgtgtgcaccactcagattcatcagcatactgtcatgacccgccaccgggataacctgcatttcagtaacaacaggcgtcgtaaattgagaactcatatttatgtcctttttcagaatcaatgacggccgaaaacgggacgtttacggtcaaaggtccagccggggatcaggcactgcatcggacctgcgtcgttacgcgcaccgccaggcagacgtttataggcctcatgtgccttttgtacctgttcccagtccagttccacgcccagaccgggcgcatcaggaacggcaatttttccgtttttaatctccagcggattttgggtcaggcgacaatcgccctcctgccaaatccagtgggtatcgatagcggtaggattacccggtgccgccgcgcccacatgggtaaacatcgccagagagatatcgaaatggttattagaatggcagccccaggtcagcccccagtcgtcgcaaagctgcgccacacggactgcaccggaaagcgtccagaagtgcggatcggcaagtggaatatctaccgcattgagcatcaccgcatgacccatttcgcgccagttggtggcgatcatgttagtcgcgacgggcaagccggtcgcccgtcgaaattccgccatcacttcacgtccggagaagccctgttctgcgccgcatggatcttcggcataggtaagaacatcattcagccctttgcataaagaaatggcttcatcaagcagccatgcaccgttgggatcaacggtaatccgcgcatccgggaagcgtttcttcaatgcacgaacagtgtcgatttcttgctcgccaggtaacacgccgcccttaagtttgaaatctttaaagccgtagcgatcctgactggcttccgccagacgcacaacggcttcgctgttcattgctttctgatgccgcaactgataccactcatggttgcccggcgtattttccacataaggaagatcggttttggtccgatcaccgatataaaacagataaccgaggacggtaatagcctcgcgttgcttgcctggccctaacagttcgcagaccggaacattcagcgccttacctagcaggtcaagcaaagcggcttccagcgccgccacggcgttaacgcgtaattcaaaggtccaggcacctttaccgaaggtatcaaaatcggcggcctgattacctttatgcacctgctggaccactttattcagtcgcgcaacttcctggcccagaaccatcggaatagcatcgacaagcgtctgataaatcacatctccgcccggcgcttcaccaatgccggtatgcccggcgttatcggtgagtaccacaatattgcgggtgaaatatgcgttatgtgccccaccaatattaagcaacatgctgtcatgcccggccaccggaatgactttcatatcagtaataacaggactggattgtgtcgccatcttattgccccgcaacaggtttcaactcgatacgcttgatatcgcccaccagcaccaggtagctcagtaccgcgattaaggcatgaacaccaacataaatcagcgccccattaaagctgccagtcgtgccaacgatataaccaattgcgattggcgtgacgatgccagaaatgttaccgaacatgttgaacaggccaccggaaagaccgctgatctcttttggcgcggtatctgccattactgcccaacccagcgccccgatgcccttaccgaagaaggccagcgccataaagccgatgatcatccactcaacgttgacgtagttgcagaacaccatcaccatgctcagcaacatgcccattacgatcggtgttttacgcgcaatgttcaggcttcccgtgcggcgcatcagccagtcggaaataatcccacccagcacaccgccgataaaaccgcaaaccgccggaacggaagccacaaagcccgctttcagaatgctcatcccgcgtgcctgcaccagataaaccgggaaccaggtaataaagaagtaagtcagggcgttgatacagtactgaccgatataaacgccgatcatcatccgactccctagcagctgtttgatctgcccccacttcacgctgaacggcactttaactttggtgttttgctgatccatattgatcagcgcaccacccgcggcgatgtactccagctctttcttatttacccccggatgttgatttggctcgtggatgactttcaaccagataaagctgatgacaatccccagaccgcccataaagaagaagacgtgactccagcccacttcatgcgtcagccagcccataatcggcgcgaagatcaccgttgcgaagtattgagcggagttaaaaatgctcaccgccgttcccctttcctgcgccggaaaccaggccgcaacaatgcgactgttgccggggaaagatggcgcttcagcaagcccgaccaggaagcgcagcgtaaacagggcaacgataatgccgaatccactaaagatatcgacgaagccttgcagcaaggtaaacatgctccagataaagatgctccagaagtagacgcgtttactaccaaaacggtccagcaaccagccaccagggatctgcccgataacataagcccaactgaaagcagagaacacatagcccattcccacgggatcaaggccgatatctttggccatttcgctaccggcgatagagagcgtagcgcggtcgccgtagttgaaggatgtgacgataaacaacatcaccactatccagtaacgagcatttgtgcgtttttccacactgctcgcagcctgacttaaagaactcattgttgcactcctgaaaattcgcgttagccacgctcactctggactgcgacatcgccaggaaatcagaggtgacgtagggtgttttttgccgtttttataggtcgttcgccgaatacggcgcgtgtttatatctggcaatagcagtataaaaagcgcgccatagcggctcaccgtgcaacaacacaacattaatgcgttcaatgaggcccgattttggcattagccctggacggtggaatccacttcacggaaatgaaaacaagaacaagaaaggaagggttaaaacgaagaaataaagaagagtatgaaatggatcgcttgactccaggcaaacgccagtaaaaatccgcgctatgaagcagtttttactggcatttgcctgaaaagattcgattcagcaccgctaaaacgacatttaccgctcgctgaacatatcaggacaacagcgtgccccactgttcgacccacggattactttccgtttccggttccgggttctcactggcgtcaatcaacagcatttcgccaacccgctgagcgctctgttcctgcaacaaggcatcgaactgtttgccgccattgcagaaattcacataactactgtcgccgagcgcaatcacgccataacgcagattcggctggaagcccagactatctttgattccctgaaagagtggcacaatgctatcaggaaggtcgccctgcccggtcgtggacgtaaccaccagaacatacttatcctgatagggcagccagtcgcttaattcaggatcttcaaataccgttgctttgtggccctgcgcggtcagaatcgcttccgcttcttcggccactaacagactattcccgtacatggtgccgacaaaaataccaatttccgccataccgttttctccctggattaggaacttatctctccatcctgaccgcttggcgcactgaactcaaccctttcattttcaggaagcagaccgcgccagccaaattgacttaacgcctgcatccaggtgtcgtccaggcccgcgtgaatagtcagcggctcgccagtaaaaggatgcgtcaaactcaactgactggcatgtagcattaaccgctggaggccaaaatgctcagcaccgctgcgattctggcgtaaatcgccatgtttgctatcgccaataatcggatgacgcaaatgggcaagatgtcggcgaagctgatgtttgcgtccggttttcggctccagttccaccaggccgtagcgcgtggtcgggtaacgtccggtcgctaccggcatttctacggtcgccagaccgcgataatgcgtcactgctggctgcgggcctttatcttcgcgggcaaatttatcagcgattttgtccagttcttccaccagtggataatccagcaccgcttcttccatcaaccagccgcgcacaatcgcatggtaacgtttctggatttggtgctgttcaaactgttgtgccagcagccgtccggcctcgctggataatcccatcaacaacacaccagaagtgggtcggtccagacgatgagcagtaaaaacatgctggcctatctggtcacgcacggtttgcatgaccactactttctcgtcgcgatccagccagctgcggtgaaccagccagccggagggtttatttaccgcaaccagccattcatcctgatagagtatttccagcattagctcgcatcatccgcaaaaagagcatccagtttttccagctcagccagaataagcgcgcgttgcggatggtccgtcgccagcgccatttcataatagggtgcaacggcaaaagcgcccggtaacggctgtttgttatctaacaaatcgtgcattcgcgggatcagcacccactgcaaccactccagtggttccatggtgtccataaagaacggttgggtactattaaattgatgcggctggggttcatcgtttcgccagtgctgatgttcacgcagtaacgcttcaagcgcctgcaactggagacgaacgcggtcatgagtggtcataaagcaacctcaataagaaaaactgccgcgaaggatagcaggaataaaaaaagggagcactgtattcacagcgctcccggttcgtttcgcagcattccagctacttttgttgctccctgctcatccttgacaacttttcctctggccttgcggccaatcgttcatcctgaactattgcttcctgctcacaccaccccgatgtgatacttcatcctgaagtgtccctggccttcctgacccaccgaatcatcctgaccggttctcattctccatcctggaggtgtcctttaacgcgtcctgcgtcatcctcttcgcttcatccagaagcctttccctgaaacaccatcctggtgtgtcctgcagaagtgtcatcatcctgatgttcacttcgttgtctgactccctgtcgacgaagatagaatcgtctttttcgcgaagtcttacaaggcgcttacagacaatgccttaaggaaaatttcatatgaaagttaagaattaacaatcaacattttgattttaaatgaaaataacgattcttatctttttaagtattcgcttatttcctggcgatctcctacagagtctgtaagagatctctcacaaccagatggggtatttggattacagaagaggcttaagttgattaaggaattccgcaagattactggctaaatgcgtccgtttacgtgttcccagcgtctctttgcacacttcaccggagagattacacacgctgatgacctctaactcttcttccagcgtcgcgataaatagtgtgggcggcagttttagccttttctgagtcaccagatgaccaatcagattttcctgcacccgacggaagtcgtcttcactccaggtttgcagcaatgtcagtttgatatcgccaaactgcgcgtgcatatccccggcaaactgagtcgtataaaaggtatgaattgtgggttgtatcacaatatcaaaagcgcgttcaaccgcgtttacattttgttccccggtaaacggctggggttgccagtatacggcatcttcggtagtactaataatgcacggactaggaacaccgtacagttcctcacttaacggccagcttttatgctcttcatgccacgcatcgcagtagcgtgcagtaaaatctttcagggcttgtgcggtcaaatcgtccactaatttctctcttcacttaaaccagatacacttgtcgtttagtttatctggtttatgacggtgaaacatgtcttcttatgcaaaccatcaggcacttgcgggcctgactcttggaaaaagtaccgattaccgggatacctatgacgccagcctactgcaaggcgttccacgcagcctgaatcgcgacccgctgggtctgaaagcggataacctgccttttcacggtacggatatctggacgctgtatgaactttcctggctgaatgcgaaaggtttgccgcaggtcgctgtcggtcatgttgaacttgattacaccagcgtaaatctgattgagagcaagagttttaagctctatctcaacagttttaaccagacgcgttttaataactgggatgaggtgcgccagacgctggagcgcgacttaagcacttgcgctcagggtaagattagcgtggcgttatatcgtcttgatgaactggaaggccagccgataggtcattttaatggcacttgcattgatgaccaggatatcactatcgataactatgaattcactactgactatctggagaatgccacctgtggtgaaaaagtagtggaagagacgcttgtcagccacctgctgaaaagtaactgcctgatcacccatcaaccagattggggtagcctccaaattcagtatcgtggacgccaaattgacagagaaaaactgctgcgttacctggtcagtttccgtcatcacaacgagttccacgaacagtgcgtggaacgcatctttaatgacctgttacgcttctgccagccagaaaaattgagcgtttacgcacgttatacccgtcgtggcggtctggacattaacccgtggcgcagtaatagcgattttgtcccaagcaccacaagactggttcggcaataaatttttctcaattttgcgtgctggattcacgcagaaggttgtgaaaggtcatcaggcagggctattgtaatcaaagggaatgacgatattcgtcccataaggagtttttcttgattacacatattagcccgcttggctccatggatatgttgagccagctggaagtggatatgcttaaacgcaccgccagcagcgacctctatcaactgtttcgcaactgtagtcttgccgtactgaactccggtagtttgaccgataacagcaaagaattgctgtctcgttttgaaaatttcgatattaacgtcttgcgccgtgaacgcggcgtaaagctggaactgattaatcccccggaagaggcttttgtcgatgggcgaattattcgcgctttgcaggccaacttgttcgcggtcctgcgtgacattctcttcgtttacgggcaaatccataacaccgttcgttttcccaacctgaatctcgacaactccgtccacatcactaacctggtcttttccatcttgcgtaacgctcgcgcgctgcatgtgggtgaagcgccaaatatggtggtctgctggggcggtcacagtattaacgaaaacgagtatttgtatgcccgtcgcgtcggaaaccagctgggcctgcgtgagctgaatatctgcaccggctgtggtccgggagcgatggaagcgccgatgaaaggtgctgcggtcggacacgcgcagcagcgttacaaagacagtcgttttattggtatgacagagccgagcattatcgccgctgaaccgcctaacccgctggtcaacgaattgatcatcatgccagatatcgaaaaacgtctggaagcgtttgtccgtatcgctcacggtatcattatcttccctggcggtgtgggtacggcagaagagttgctctatttgctgggaattttaatgaacccggccaacaaagatcaggttttaccattgatcctcaccggcccgaaagagagcgccgactacttccgcgtactggacgagtttgtcgtgcatacgctgggtgaaaacgcgcgccgccattaccgcatcatcattgatgacgccgctgaagtcgctcgtcagatgaaaaaaagcatgccgctggtgaaagaaaatcgccgtgatacaggcgatgcctacagctttaactggagtatgcgcattgcgccagatttgcaaatgccgtttgagccgtctcacgagaatatggctaatctgaagctttacccggatcaacctgttgaagtgctggctgccgacctgcgccgtgcgttctccggtattgtggcgggtaacgtaaaagaagtcggtattcgcgccattgaagagtttggtccttacaaaatcaacggcgataaagagattatgcgtcgtatggacgacctgctacagggttttgttgcccagcatcgtatgaagttgccaggcagtgcctacatcccttgctacgaaatctgcacgtaatctccgctcccccggtgacgtttgttgccgggttttctcgtttttggtcacttactcatcaactcatttcatttgttatatgaatgtttctcaccaccctcacgcgacaaatatcatcacagttaatatgtcatacaatttatgttgcaacgcaaacgtttccctattttcataaaccgtattttatcgctatgaaaaagaaattatcgccatgattaactaaaagtattgattttttcagttcaacctacatatattgcgcgccccggaagaagtcagatgtcgtttaatgggcaaatattgcccttaaattctcttttacttttgatttacagagtaaagcgttgggataatctatcttccaagtagattattgtatttgagatcaagatcactgatagatacataacttgtgtgtatctttccgccctcaaattattacggcggtaaatgattaagccatcgccgatagacagatttcatttttacggtcaggcaccttcccgggctgaactggctaaaagctgaattatttgcattcctccaggagaaatagatggaaacgactcaaaccagcacgattgcgagcaaagactctcgtagtgcctggcgcaagacagacaccatgtggatgctgggcctttacggcacggcaatcggcgcgggcgtgctgttcctgccaatcaacgccggtgttggcggtatgatcccgctgatcatcatggctatccttgcgttcccgatgacgttttttgctcaccgcggcctgactcgcttcgtactgtctggtaaaaacccgggcgaagacatcaccgaggttgtagaagaacactttggtattggcgcaggtaaactgattaccctgctctacttcttcgctatctacccgatcctgctggtttatagcgtggcaatcaccaataccgttgaaagcttcatgtctcaccagctgggtatgacgccaccgccgcgtgcgattctgagcctgatcctgatcgtgggtatgatgaccatcgttcgcttcggtgagcagatgatcgttaaagcgatgagtattctggtattcccgtttgttggcgtactgatgctgctggctctgtacctgatcccgcagtggaacggcgctgcactggaaacgctgtctctggacactgcatctgcaaccggaaacggtctgtggatgaccctgtggctggcaattccggtaatggtgttcagcttcaaccactctccgatcatctcttctttcgccgttgcgaagcgtgaagagtacggcgatatggcagaacagaaatgcagcaagatcctggcattcgcacacatcatgatggtgctgaccgtaatgttcttcgtcttcagctgtgtactgagcctgactccggcagacctggctgcggctaaagagcagaacatcagcattctgtcttacctggctaaccactttaacgcaccggttatcgcgtggatggctccgattatcgcgattatcgctatcaccaaatccttcctcggtcactacctgggcgcacgtgaaggcttcaacggtatggtgattaaatctctgcgtggtaaaggtaagtctatcgaaatcaacaagctgaaccgtatcactgcgctgttcatgctggtaacgacctggattgttgccaccctgaacccgagcatcctgggtatgattgaaaccctgggcggtccaatcatcgcgatgatcctgttcctgatgccgatgtacgcaattcagaaagtaccggcaatgcgtaagtacagcggtcacatcagcaacgtattcgttgtcgtgatgggtctgattgcaatctccgcaatcttctactctctgttcagctaagtcctttcgcgccgctttcgggcggcgcttcctccgttttaacgcgatgtatttcctatgattagcgtattcgatattttcaaaatcggcattggcccttccagttctcataccgttggaccaatgaaagcgggtaaacaatttaccgacgatctgattgcccgtaacctgcttaaagacgtgacccgcgtggtggttgacgtgtacggcagcctctctctgaccggtaaaggccaccacactgatatcgccattattatgggcctggcgggtaacctgccggataccgtggatatcgattccatccccagttttattcaggatgtgaatactcatggtcgcctgatgctggcaaacggtcagcatgaagtggagttcccggttgatcagtgcatgaacttccacgccgacaacctttctctgcatgaaaacggtatgcgcattaccgcgctggcgggcgataaagtcgtttacagccagacttactactctattggcggtggctttatcgttgatgaagagcattttggccagcaggatagcgcaccggttgaagttccttatccgtacagtagtgcagccgatctgcaaaaacattgtcaggaaaccgggctgagtctctctggcctgatgatgaaaaacgagctggcgctgcacagcaaagaagagctggaacagcacctggcgaacgtctgggaagtcatgcgcggcggtattgagcgcggtatttccaccgaaggcgtgttgcctggcaaactgcgcgttccacgccgtgctgcggcactacgccggatgctggtcagccaggataaaaccaccactgacccgatggcggttgttgactggatcaacatgtttgcactggcagtgaacgaagagaacgctgctggcggtcgcgtggtgactgcgccgactaacggtgcgtgcgggattatcccggcagttctggcgtactacgacaagtttatccgcgaagtgaacgctaacagtctggctcgttacctgctggtagccagcgccattggttctctttataagatgaacgcgagcatttctggtgctgaagtgggttgccagggtgaagttggcgtggcgtgcagtatggcggcggctggtctggcagaactattaggcgcaagcccggcgcaggtgtgcatcgcggcggaaatcgccatggagcacaacctcggtctgacgtgtgacccggtcgccggacaggtacaggtgccatgcatcgagcgtaacgccattgcggcagtaaaagcggtgaacgccgcacgtatggcgctgcgccgtaccagcgagccgcgcgtctgcctcgataaagttatcgaaaccatgtacgaaacaggtaaagatatgaacgccaagtaccgcgaaacctctcgcggcggcctggcaatgaagatcgttgcctgcgattaatcgctctccaaaggcctcgttttgcgaggcctcttcccgatttctcatccagccgtagcctgttccggcatcgaatgttacccttatcgcctgatctttaagggggttatcgtggctgttcatttgcttattgtcgatgcactgaatcttattcgtcgcattcatgccgttcaggggagcccctgtgtcgaaacctgccagcatgcgctcgatcagctcattatgcacagccagccaacccacgcggtcgccgtttttgatgatgaaaaccgcagtagcggctggcgtcatcagcgtttaccagattacaaagcgggtcgaccgccaatgccggaagagttgcacgacgagatgcctgcattacgcgccgcctttgagcaacgcggcgtcccgtgctggagtaccagcggcaacgaagccgatgacttagccgccacgctggcggtcaaagtgacacaggccgggcatcaggcaacgattgttagcacagataaaggctactgtcagttacttagtccgacattacgtattcgtgattacttccagaaacgttggctggatgcgccatttatcgataaagaatttggcgttcaaccgcagcagttgcccgattactggggacttgcggggatcagcagtagtaaggtaccgggtgttgcgggaatcggaccaaaaagcgccacgcagctgctggtcgagtttcagagtctggaagggatatatgagaatctggatgcggttgccgaaaagtggcgcaaaaaattagaaacccataaagagatggcgtttctgtgccgcgatattgcccgcttacaaaccgatttgcatatcgacggcaatttacagcaattgcggttggtacggtaacggcgagccggatacgccgcaaacgtcgtatccggcattatcacatcagcgcatttaccaggcggtatggtaaagctctacaatatcctcaagcgttgcttcacgcgggttgccaccggtacaaacatcatccagtgccgcctgcgccagtgccggaatgtcttccttgcgtacaccaacatcacgcaaatgtggcggaataccgacatcacggttgagagcaaacaccgcttcaacagcggcattacgcgcctcttccaggctcataccttccactttcacgcccataacgcgcgcgatatcgcggtacttctcaccggtaaagtcagcgttataacgcatgacatgcggtaacaggatggcgttcgcaacaccgtgtggagtgttataaaacgcgcccagtggatgcgccataccatgcaccaaccctaacccaacattgctgaagcccatacccgcaacatactgcccgagcgccatttcttctccggcatccttatcaccagcaacgcttcctcgcagcgccccagcaatgatttcaatcgctttaatgtgcagtgcatcggttagcgcccacgcgccacgggtaatatacccctcaatagcatgagtgagcgcatcgacacccgtcgcagctttcagcgctggaggcataccatccatcatgtcagcgtcaataaacgccacctgcgggatatcatgcggatcaacgcaaacaaacttgcgccgtttctcttcgtcagtgatcacgtagttaatggtcacttctgccgcagtacctgctgtggtaggaattgccagaatcggtacactgggtttattggtcggggaaagcccttccaggctacgcacatcggcaaactccgggttgttgctgataatgccaatcgctttacaagtatcctgtggagaaccaccaccaatagcgatcaggtaatccgcgccgctattctggaatacaccgagcccttctttgacgacagtaattgttgggttgggcactacgccgtcgtaaatcgcccatgccagccctgcagcatccatcttatcggtcactttcgccaccacgccgcattgcaccagcgttttatcggtgacgatcagcgccttctgataaccacggcgtttcacctcatcggttaaagccccaacagcaccccgaccaaaccatgccgtttcgttcagaatcattctgttagccatcatccttctccttgttgctttacgaaattactcttcaattcgtaacccataggttttgaatttctccagcactacggcaatctcttcatcgctcagcactggcaccgggtccgtaatcgccagggtcgtcaggtaaagttgcgccagcacttcaacttcatgcgccagccataacgctttttccagattcacctcacaagcgataagcccatgatgttgtaacaaagttgccttacgatttttgagagccagcgcaacatgttcagaaagttcgcgtgttccaaaggtcgcataaggcgcgcaaggaatagaattaccgccagccgccgcaatcatgtagtgaatagcggggatgcttcggttaagaatggaaactgccgtgcaatgaacggcatgattgtgaacaaccgcgttggcatccggtctgctttgataggctgccatatggaaacgccattcgctactggggagctttccttcctcatgtttaccgttgccatcaataaagacaatatggctctccgtcagtttttcatatggaatgcctgtaggcgtaatcagcatcccatcctgataacgtacactgacgttccccgctgtcccctggttcagtcccaggcgggtcatttccaggcaagtgtcaataatctgacgagcaagtttatttcgttccattagctacctctctctgattcaaaacagggcaataatgttgttcctttcacactattgaattagccgtttaattacccaccatcttcttcctgattaacaagaaagaaattcacaagcttatattttgtgacctggttcaactaatcacagtaaataactgcaagttctctttttataaccccattaaaaatgaccgctcttaaaaatatttatcaaaacggtcatttttctattcctccaagcccggaatgaccgttttcggcacaaacaattaatacggtcatctgatttgtgttttttatgatttattttctgaaacgggcatgaaatttcgattattaaagtgatggtagtcacataaagtcaccttctagctaataagtgtgaccgccgtcatattacagagcgttttttatttgaaaatgaatccatgagttcatttcagacaggcaaatattcactgatatgaagcccgaactcgctggttttgcacttttgaaaacataaccgattacgtgcttaagcttctgaacctaagaggatgctatgggaaacacaagtatacaaacgcagagttaccgtgcggtagataaagatgcagggcaaagcagaagttacattattccattcgcgctgctgtgcagtctgttttttctttgggcggtagccaataaccttaacgacattttattacctcaattccagcaggcttttacgctgacaaatttccaggctggcctgatccaaagcgccttttactttggttatttcattatcccaatccctgctgggatattgatgaaaaaactcagttataaagcagggattattaccgggttatttttatatgccttgggtgctgcattattctggcccgccgcagaaataatgaactacaccttgtttttagttggcctatttattattgcagccggattaggttgtctggaaactgccgcaaacccttttgttacggtattagggccggaaagtagtggtcacttccgcttaaatcttgcgcaaacatttaacagctttggcgcaattatcgcggttgtctttgggcaaagtcttattttgtctaacgtgccacatcaaagccaagacattctcgataaaatgtctccagagcaattgagtgcgtataaacacagcctggtattaagcgtacagacaccttatatgatcatcgtggctatcgtgttactggtcgccctgctgatcatgctgacgaaattcccggcattgcagagtgataatcacagtgacgccaaacaaggaagcttctccgcaagcctttctcgcctggcgcgtattcgccactggcgctgggcggtattagcgcaattctgctatgtcggcgcacaaacggcctgctggagctatttgattcgctacgctgtagaagaaattccaggtatgactgcaggctttgccgctaactatttaaccggaaccatggtgtgcttctttattggtcgtttcaccggtacctggctcatcagtcgcttcgcaccacacaaagtcctggccgcctacgcattaatcgctatggcactgtgcctgatcagtgccttcgctggcggtcatgtgggcttaatagccctgactttatgcagcgcctttatgagcattcagtacccaacaatcttcagcctgggcattaagaatctcggccaggacaccaaatatggtagctccttcatcgttatgaccattattggcggcggtattgtcactccggtcatgggttttgtcagtgacgcggcgggcaacatccccactgctgaactgatccccgcactctgcttcgcggtcatctttatctttgcccgtttccgttctcaaacggcaactaactgaacatattttccgaataaagtgaggaatctgtaatgaaaaaaatcagcttaccgaaaattggtatccgcccggttattgacggtcgtcgcatgggtgttcgtgagagccttgaagaacaaacaatgaatatggcgaaagctacggccgcactgctgaccgagaaactgcgccatgcctgcggagctgccgtcgagtgtgtcatttccgatacctgtatcgcgggtatggctgaagccgctgcttgcgaagaaaaattcagcagtcagaatgtaggcctcaccattacggtaacgccttgctggtgctatggcagtgaaaccatcgacatggatccaacccgcccgaaggccatttggggctttaacggcactgaacgccccggcgctgtttacctggcagcggctctggcagctcacagccagaaaggcatcccagcattctccatttacggtcatgacgttcaggatgccgatgacacaagcattcctgccgatgttgaagaaaaactgctgcgctttgcccgcgccggtttggccgtcgccagcatgaaaggtaaaagctatctgagcctgggcggcgttagcatgggtatcgccggttccattgttgatcacaacttctttgaatcctggctgggaatgaaagtccaggcggtggatatgaccgaactgcgtcgccgtatcgatcagaagatttacgacgaagccgaattggaaatggcactggcctgggctgataaaaacttccgctatggcgaagatgaaaataacaaacagtatcaacgtaatgccgagcaaagccgcgcagttctgcgcgaaagtttactgatggcgatgtgtatccgcgacatgatgcaaggcaacagcaaactggccgatattggtcgcgtggaagaaagtcttggctacaacgccatcgctgcgggcttccaggggcaacgtcactggaccgatcaatatcccaatggtgacaccgccgaagcgatcctcaacagtagttttgactggaatggcgtgcgcgaaccctttgtcgtggcgaccgaaaacgacagtcttaacggcgtggcaatgctaatgggtcaccagctcaccggcaccgctcaggtatttgccgatgtgcgtacctactggagtccagaagcaattgagcgtgtaacggggcataaactggatggactggcagaacacggcatcatccatttgatcaactccggttctgctgcgctggacggttcctgtaaacaacgcgacagcgaaggtaacccgacgatgaagccacactgggaaatctctcagcaagaggctgacgcttgcctcgccgctaccgaatggtgcccggcgatccacgaatacttccgtggcggcggttactcttcccgcttccttaccgaaggcggcgtcccgttcaccatgactcgtgtcaacatcatcaaaggcctgggaccggtactgcaaatcgcggaaggctggagcgtggaattgccgaaggatgtgcatgacatcctcaacaaacgcaccaacagtacctggccaaccacctggtttgcaccgcgcctcaccggtaaagggccgtttacggatgtgtacagcgtaatggcgaactggggcgctaaccatggggttctgaccatcggccacgttggcgcagactttatcactctcgcctccatgctgcgtatcccggtatgtatgcacaacgttgaagagaccaaagtgtatcgtccttctgcctgggctgcgcacggcatggatattgaaggccaggattaccgcgcttgccagaactacggtccgttgtacaagcgttaatacattactccctgatgtgatgcccggtcgctccggctaccgggcctgaacaagcaagagtggttagccggataagcaatgttatccggctatattgcaggagcgattatgaaacaagaagttatcctggtactcgactgtggcgcgaccaatgtcagggccatcgcggttaatcggcagggcaaaattgttgcccgcgccagtacgcctaatgccagcgatatcgcgatggaaaacaacacctggcaccagtggtctttagacgccattttgcaacgctttgctgattgctgtcggcaaatcaatagtgaactgactgaatgccacatccgcggtatcgccgtcaccacctttggtgtggatggcgctctggtagataagcaaggcaatctgctctatccgattattagctggaaatgtccgcgaacagcagcggttatggacaatattgaacggttaatctccgcacagcggttgcaggctatttctggcgtcggagcctttagtttcaatacgttatataagttggtgtggttgaaagaaaatcatccacaactgctggaacgcgcgcacgcctggctctttattagcagcctgattaaccaccgtttaaccggcgaattcactactgatatcacgatggccggaaccagccagatgctggatatccagcaacgcgatttcagtccgcaaattttacaagccaccggtattccacgccgactcttccctcgtctggtggaagcgggtgaacagattggtacgctacagaacagcgccgcagcaatgctcggcttacccgttggcataccggtgatttccgcaggtcacgatacccagttcgccctttttggcgctggtgctgaacaaaatgaacccgtgctctcttccggtacatgggaaattttaatggttcgcagcgcccaggttgatactagcctgttaagtcagtacgccggttccacctgcgaactggatagccaggcagggttgtataacccaggtatgcaatggctggcatccggcgtgctggaatgggtgagaaaactgttctggacggctgaaacaccctggcaaatgttgattgaagaagctcgtctgatcgcgcctggcgcggatggcgtaaaaatgcagtgtgatttattgagctgtcagaacgctggctggcaaggagtgacgcttaataccacgcgggggcatttctatcgcgcggcgctggaagggttaactgcgcaattacagcgcaatctacagatgctggaaaaaatcgggcactttaaggcctctgaattattgttagtcggtggaggaagtcgcaacacattgtggaatcagattaaagccaatatgcttgatattccggtaaaagttctcgacgacgccgaaacgaccgtcgcaggagctgcgctgttcggttggtatggcgtaggggaatttaacagcccggaagaagcccgcgcacagattcattatcagtaccgttatttctacccgcaaactgaacctgaatttatagaggaagtgtgaaatgctgaaaacaattagcccgttaatttctcccgaactattgaaagtgctggcagagatgggacatggagatgaaattattttttccgatgctcactttcccgcccatagcatgggaccgcaggtgatccgcgctgatggcctgttggtgagcgacttgctccaggcgattatcccgttatttgaactggacagttatgcaccgccgctggtgatgatggcggcggtagaaggtgacactctcgatcctgaagtagaacgacgttaccgtaatgcgcttagtctacaagccccgtgtcctgacatcatccgcatcaatcgttttgcgttttatgaacgggcgcaaaaagcctttgcgatcgttatcacaggcgaacgagcgaagtacgggaatattcttttaaaaaaaggggtaacaccgtaatctcataccggtacgcccgcatgacgcgggcggttatcgaatgatggggtgaaaaatatgaaagcggcacgccagcaagcgatagtcgacctgctgctgaaccataccagcctgaccacggaagctctctctgaacagctaaaggtcagtaaagaaaccattcgtcgcgatctcaatgaattacagacgcagggtaaaattctgcgcaatcatggacgcgctaaatatatccaccgtcaaaatcaagacagtggcgatccctttcacatcaggctgaaaagccattatgcgcataaagcagatatcgcgcgcgaggcgctcgcgtggattgaagaagggatggtgatagccttagacgccagtagtacttgctggtatctggcacgccagttgcctgacatcaacattcaggtcttcaccaatagccatccgatttgccatgaactcggtaaacgcgaacgcattcaactgatcagttccggcggcacacttgagcgcaaatatggctgttacgtcaatcccagcctgatttcccaacttaaaagcctggaaatcgatctgtttattttttcttgtgaagggatcgatagcagcggcgcactgtgggactccaatgcgatcaacgctgattacaaaagcatgctattaaaacgtgccgcgcaaagcttgttattgattgataaaagtaaatttaatcgtagtggggaagcccgcatcgggcatctggatgaggtaacgcacattatttctgatgagcgccaggttgcaacttctttggtaacagcctgacggaaagggtagcaggccggagacgacgccccggccttgcctgttatcgctcgtcgcgacgaccacccaccgcagcccagatgcggcggacgtgcaccgtcacttcttcgcgatcgtgatacaactgccgcgcctgaatctgagcatttatgccatgttcatcaagctgtgcctgaatatacgccagattgtgactcacttcttcgtagcgttttttcatcggcagtttgaggttgaaaatggtttcacggcaccagccattaaccagccactgtgccatcaatgccgcaactttcgccggtttttcaaccatatcgcataccatccaggagatattgctgcgcgtcggacggaatttgaaaccgtcttcccgcagccacgtcacctgtccggtatccatcagactttgcgccatcgggccgttgtcgacggaataaacccacatgttgcgcttcaccagttggtaggtccagccgccagggcaagcgcctaaatccaccgcccacatcccgttcgccaggcgttcatcccactcatccgcaggaataaacacatgaaatgcctcttccagtttgagcgtggaacgactcggcgcatctgccggaaatttcaggcgcggaatgcccatatagaacgggctattattgttgctgtaactgtaaccggtatagcagcagcctggtgcaataaagaatacatgcacaaccggacgcttcggcgtttcatagttcgccagcaccccggcatcgcgcaaggcagcgcgtagcggaacagtaaatttacggcagaatttcagtaactctttgctttcgttggtatcggcaacttcaacacgcagttcaccgcccttctctactacgccctgtaacatgccgacaatgggggtaatacgatcttctggcggcaaatgctgcaggagttcccccaccacaaaccactggcgggcaaaaattaaactactgaacggcagctcacggattaacttatcgccatcatcaggttgataacattcataaatgacataacccgcattctctttcacgcgggcaaaaccgaaaatttcccgctggccggctttatcggtaatttctgcggcgcactctttttcaaagcccggacggcacagcaatacaaccttattcatgacttacgcccttgcgctttaaacggatagcaccaactaacattaacgcccagcccgcgaggaagctcacgccgccaaccggagtgacaaacgcccacaaacgcagatgggacagcgccaggcaataaaggctgccgctgaacaacaccgtgcctaacgcgaggaaaacgctactccagtaaaaccagatactgatgcgacgctgcattgccaccgccagacctaagatcgccagcgtatgaaacgcctggtattcgaggccggtctggatccagcccatctcaacggcccccatggttttacttaacacatgcgcgccaaaagcgcccagagccacaaaaatgaagccgctaatggcggcgaaaatcagcataaaacggctggtcatggtcgtaccctacgtaaattattgttcataacgaaagcggaatttttcttgttcagcagcggctttcgccaggatccattggcgaaaggcggctattttacccagttctgcctgactgtcatgacaaaccagataaaaagcatttttactgaccagaacatcattaaacgggcaaacaagacgtccggcctcgatttcagattgcgccatcacgttatttgccagcgccactccctgcccgtggatagccgcttgcagcaccatggcgctatggctaaaaattggcccttgctgaacgttgatatgatttaaccccaactgtcgggtatatgtctgccagtcacggcggctagcatcatgtaataacgtatgtttagccagatcttccggtgtcttcaagggtttttcgccagtcagcagtagcgggctacacaccggcaataaatattcggcgtacagtttttccacccgtagccccggccagttgccccgaccataaaatatcgccacatcaacatcatccgccagcttatcttcctgacgatcaaccgcctggattcgaacgtcaattcccggataagcactattaaagctggaaagtcgcggaaccaaccaatgaatggcgaaactggggagtaaactgaccgtcaacgcccccttggcgctacgggcctggagtttacgcgtcgcttcggttaattggctaaatatctctttgatatcgaggaaatagctttgcccttcctcggtcagcaggagactacgattacggcggcggaacagttttagccccaaaaaatcctcaagagacttgatttgatgacttactgcggcttgggtcacaaaaagctcttctgctgcgcgagtgaaacttaaatggcgtgctgcggcatcaaaaactcgtaaggcatttagcggtggtaatcgtttagacatggctattaaactttgatgttaaatgaatttaacaattagatcacactatgtaacctattagtttttttaatctgagccattataaattgtccgttgagcttctaccagcaaatacctatagtggcggcacttcctgagccggaacgaaaagttttatcggaatgcgtgttctggtgaacttttggcttacggttgtgatgttgtgttgttgtgtttgcaattggtctgcgattcagaccatggtagcaaagctaccttttttcacttcctgtacatttaccctgtctgtccatagtgattaatgtagcaccgcctaattgcggtgcttttttttaccttgcgatcgcgaattactgatccagttcgaccatctctttcacgtcagtacggttgatctgctgtttgttgccattagcgtctttatagctaatcataccggtatcgttatcagtctgtggtttgccgtcagagacgatggtacgtccgtcattggtgtgcatcacatagttgctaccggaacaggcgctcagggcaaaagtcagcatacaggcagaaataattgcggcagtctttttcatcatcttctccttaaagcgattaataaatcttaatagtattgattaacaggctaaaattaacgcctaacactattcagcatatgttacttacgcggcttcgccaggatatccagataattctgatggttagcactctccttgtatcaaagtgaattttgcgtcacgatcggtgcatcaagccgaggagtaccatgaacgtttttaatcccgcgcagtttcgcgcccagtttcccgcactacaggatgcgggcgtctatctcgacagcgccgcgaccgcgcttaaacctgaagccgtggttgaagccacccaacagttttacagtctgagcgccggaaacgtccatcgcagccagtttgccgaagcccaacgcctgaccgcgcgttatgaagctgcacgagagaaagtggcgcaattactgaatgcaccggatgataaaactatcgtctggacgcgcggcaccactgaatccatcaacatggtggcacaatgctatgcgcgtccgcgtctgcaaccgggcgatgagattattgtcagcgtggcagaacaccacgccaacctcgtcccctggctgatggtcgcccaacaaactggagccaaagtggtgaaattgccgcttaatgcgcagcgactgccggatgtcgatttgttgccagaactgattactccccgtagtcggattctggcgttgggtcagatgagcaacgttactggcggttgcccggatctggcgcgagcgattacctttgctcatagtgccgggatggtggtgatggttgatggtgctcagggggcagtgcatttccccgcggatgttcagcaactggatattgatttctatgcttttagtggtcacaaactgtatggcccgacaggtatcggcgtgctgtatggtaaaagtgaactgctggaggcgatgagcccctggctgggcggcggcaaaatggttcacgaagtgagttttgacggcttcacgactcaatctgcgccgtggaaactggaagctggaacgccaaatgtcgctggtgtcataggattaagcgcggcgctggaatggctggcagattacgatatcaaccaggccgaaagctggagccgtagcttagcaacgctggcggaagatgcgctggcgaaacgtcccggctttcgtagtttccgctgccaggattccagcctgctggcctttgattttgctggcgttcatcatagcgatatggtgacgctgctggcggagtacggtattgccctgcgggccgggcagcattgcgctcagccgctactggcagaattaggcgtaaccggcacactgcgcgcctcttttgcgccatataatacaaagagtgatgtggatgcgctggtgaatgccgttgaccgcgcgctggaattattggtggattaatgacaaacccgcaattcgccggacatccgttcggcacaaccgtaaccgcagaaacgttacgcaataccttcgcaccgttgacgcaatgggaagataaatatcgccagttgatcatgctggggaaacagcttccggcattgccagacgagttaaaagcgcaggctaaagagattgccggatgcgaaaaccgcgtctggctgggatatacagtggctgaaaacggcaaaatgcatttctttggcgacagcgaagggcgcattgtgcgcggcctgctggcggtgttgttgactgccgttgaggggaaaaccgccgccgagttgcaggcacagagtccactggcattgtttgatgagctgggattacgtgcgcagcttagcgccagtcgcagccaggggttaaatgcgttaagcgaggcgattatcgctgcgacgaagcaggtttaagcacagaaccgggtcggataagacgttcgcgtctcatccgacctgattgtttaaccctgacgcgccgctttcgccatcatcttcttcagcgcatgagaaaccgcaacaaacccaaaggtggcggtcaccatcgttgccgcgccaaatccagatgcacaatccatccgcttcggcccttctgccgtggctttcatcgcacacaccgtaccgtcactctgcgggtacaccagcgcttcagtagaaaacacgcaatccacgccgagcttacctttactgtttttcactacgccaaaatcgcttttcaggcgctcgcgcaacttcgccgccagcgggtcctgaatcgttttcgccagatcggtaacctgaatctgcgtcggatcaatctgcccacccgcgccaccggttgtgaccagtgggattttattgcgccgacaataagcaatcagcgccgctttgggccgtacactatcaatggcatcaatcacgtagctataacccacgctcatatactgcgctacgttatccggcgtcacgaaatcatccaccaccgttacacggcactccgggttaatctggcgaatacgctccgccataacttccgcttttgccagcccaacgttatcgcgcagggcatgaatttgccgattggtattggtgacgcacacatcatccatatcgataagcgtgattgcgccaatccccgtgcgcgccagcgcttccgccgcccaggaaccgacaccaccgataccaaccacacaaatatgcgcgtcagcaaacagttgcaacgctttttcaccatacagacgcgctgtgccaccaaaacgctgacgccatgcatcactaattaccacagacatagcacctcagaattaaaaagggcgaggttatccctcaccctaaacgcataaatgcctgatgcgctacgcttatcaggcctacataactcctgcaatattttggatttgcatgatttgtaggccggataaggcgttcacgccgcatccggcatgaacaacgcgcacttagtcaataatcaggatgtgaggttacccctcaccctgtcatatccgtaaaaacggcatacagaatatcacatcagccgctaaagacgttacctgcgcccggggcggttttcagcacccagacacgtccatagtggttgtaccaacctgcgcggtgtccggcttccggcccgatcccttgatagatatcgaagtgttggcctttgattgcaccaccgacatccagcgccaccatcagacgcagttcgtactgaccattaaatttgccgttattatccagcaacggcacttctgccagcaaggtagtacctggcggaataatggaacgatcagaggcaacactcgcgcgaccaaccagcggcaccgcacttgcccctttcaccggagcaaaagattgcggtttaaagaagacgaaagacgggttctgttccagcagctcgcgaacctcggcttcactgtgtgtttcgccccagtgacgaatcgcctgcatgctcatatcttcttttttcacttcgccacggtcgatcagcaccttaccaatgctgcgataggcatgaccgtttttccctgcatagctgaaaaagttaagcggactgccatcaccaaagtcgatatacccactaccctgcacatccataatgaagttatccatcagggagttactgtaagcgagaatatatttatcactcaatgcccccgcgtagatctccgcacgagacggcagacgaccacgttttggcggcatacggtaaataggatactggaactcgccctggcgggtatggcgcgcctgaattaccggcgtgtaataaccggtaaactgcacgttaccatagttgtcggcaccttccatctgccaggcatcaatgccgaactggcgcatattgcgggtatcaccgcctgcgcgcagccactcttgcaccgcgttataaacattactctggttgccatacagacgcggactgctattacggatatggttaatttgctcggcaaaatcaccggcgttaatcggcgcgccaacggcatctggctggttcaccagagagaaaggctgggtaaatttcccgtctttatattgctgtccgcgatcggttggtttggaagagcaggcggcaagcattgccacaaccgtgcccataagaaggtactttacccaacgtcctttcattgttctcttcttcaggttaaaaaataaggcgcaacgaagataacaaaccgccgcgtttaatgaaatgagcagcctctccctgacgcaaattttgcacaaaaaataggctttagtgatttgtttttgttcaaaatcatgccaaatccgtgatcggggtaaaaaaaaggttgcatgaaaacgcgagcggagtatagtgcgcatccacggacgcggggtggagcagcctggtagctcgtcgggctcataacccgaaggtcgtcggttcaaatccggcccccgcaaccaattaaaatttgatgaagtaaagcagtacggtgacgcggggtggagcagcctggtagctcgtcgggctcataacccgaaggtcgtcggttcaaatccggcccccgcaaccaatcaaatttgatgaagtaaaagcagtacggtgacgcggggtggagcagcctggtagctcgtcgggctcataacccgaaggtcgtcggttcaaatccggcccccgcaaccaattattgaacaccctaacgggtgtttttttgtttctggtctcccataaaaaagcgccattcagcgcctttttatcatccccttctcgccagcgtcgccccatcggcaaaatacgctttaatccccgcaagaatagactccgcaacttcctgctggaaagtcgccgttttcagtttacgctcttcctcaacgttactgataaacgccgtttcgaccagaatggagggaatatctggtgcctttagtacggcaaacccggcctgttcaacttgatttttatgcagcttattgattttaccgagcttattcagtaccgctttaccaaacttcaggctgtcggcaatggtcaggctctgtaccatatcgaacatggtgtggtcgacatagcggtcaccgcttttgctcacgccaccaatcaagtcgctggcgttctgggtttgtgccagatattttgccgcagtactggttgcacctttggtactgagcgcaaacacagaggaaccgctcggctgacgactggtaaaggcgtcggcatggatagagacaaacaggtcagcacgctgtttctgggcttttgctacgcgcacttgcaatggaatgaagatgtcttcattgcgcgtcatgtacaccttcatattgccctctttctcgatcagagagcgcaaacggcgagctatttgcaataccacatctttttcgcgcgttttgtatttccccaccgcaccggagtcttcgccaccgtggccagggtcaagcataatgacaatcggacgatcgcgccctgctttacccggttgtggaccactttgcgctggcggcacctgcttttcgaggtcgcctttgttgtaatcctccagcagcgccagcagcgggtcctgcatatcctgtgcattggccggatagaggtccatcaccagacgctctttaaacccggcgaccggcgcaagggcaaacagctgcggttttacgttttgctttaattcaaaaaccatccgtacggtttgcgggtcaaattgcccgacgcgcgcgctcttgatgaacgggtcgtctgcacgaatttgtgccgccatccccttgagtacgctgttcaggtttacatcttcgatatccaccaccacgcgttcagggttactcaacgcgaactgcttatatttcagctgacgattactttccaccgtcacgcgggtgtagctggacgcaggccagacgcgcaccgccacgacctggctgaccgcagccagactgacctgacttacgctcaatagccacatggcacccgcgccttgcagtaaacgacgacggctgattgcagtgttggatccactcatgcctctcccgagcaaaagaaatctaagctgtgtaacaagtaaacgactaatttgaccggaaactttagcgaaagacgcataatctgtcatctaataaacggtaaacattctttttatattcacggcattactgataaaaaagtcgctctcgcataaaatttacacttgcaccctgcgaaaaaacagaataaaaatacactaatttcgaataatcatgcaaagaggtgtgccgtggtaaaggaacgtaaaaccgagttggtcgagggattccgccatagcgttccctatatcaatacccaccggggaaaaacgtttgtcatcatgctcggcggtgaagccattgagcatgagaatttctccagtatcgttaatgatatcgggttgttgcacagcctcggcatccgtctggtggtggtctatggcgcacgtccgcagatcgacgcaaatctggctgcgcatcaccacgaaccgctgtatcacaagaatatacgtgtgaccgacgccaaaacactggaactggtgaagcaggctgcgggaacattgcaactggatattactgctcgcctgagcatgagtctcaataacacgccgctgcagggcgcgcatatcaacgtcgtcagtggcaattttattattgcccagccgctgggcgtcgatgacggcgtggattactgccatagcgggcgtatccggcggattgatgaagacgcgatccatcgtcaactggacagcggtgcaatagtgctaatggggccggtcgctgttagtgtcactggcgagagctttaacctgaccagcgaagagattgccactcaactggccatcaaactgaaagctgaaaagatgattggtttttgctcttcccagggcgtcactaatgacgacggtgatattgtctccgaacttttccctaacgaagcgcaagcgcgggtagaagcccaggaagagaaaggcgattacaactccggtacggtgcgctttttgcgtggcgcagtgaaagcctgccgcagcggcgtgcgtcgctgtcatttaatcagttatcaggaagatggcgcgctgttgcaagagttgttcagtcgcgacggtatcggtacgcagattgtgatggaaagcgccgagcagattcgtcgcgcaacaatcaacgatattggcggtattctggagttgattcgcccactggagcagcaaggtattctggtacgccgttctcgcgagcagctggagatggaaatcgacaaattcaccattattcagcgcgataacacgactattgcctgcgccgcgctctatccgttcccggaagagaagattggggaaatggcctgtgtggcagttcacccggattaccgcagtagtagtaggggtgaagttctgctggaacgcattgccgctcaggcgaagcagagcggcttaagcaaattgtttgtgctgaccacgcgcagtattcactggttccaggaacgtggatttaccccagtggatattgatttactgcccgagagcaaaaagcagttgtacaactaccagcgtaaatccaaagtgttgatggcggatttagggtaagcgatgaaaatcgtcggatgcgacatgcgtaacactcgtacgtcgcatccggcaattacgtttattcccgactactaaacaacgccgccagaccactgcgccgctcagtacgagtggcgattgccgcacttaatatgcgctcatcggcatacaggctcagacggcgacgcgcgcgggtcaccgcggtataaaccagctctcgcgttactaccggcgtgcgttggctcggcaaaatcaacgccgcatggtcgaactcgcttccctggcttttatgtaccgtcatcgcccacgtagtttcgtgctctggcaagcgactcggttgcacagacttaatattgccgtccggcatcgcaaaccagacgcgcgtcccctgcccgcgatccagcgcaataccgatatcgccattaaacaacccaagcgcgctgtcattacgggcaatcatcaccggtcgaccttcgtaccaacgagagtgcggatgacgatgaattttgcgcttctgttgcataaactgctcaattcgctcattcagtccagccacgccaaacggcccttcccgcagggcgcacaaaagctggtactcattgaacgcctgaatgattaaatccggctcggcacgcgcttgcagcagatccagataacgtccgtaacccgcaagagcttcctcaagcatcgcaatataatcttcgccgctctgtaaaagccgtttttcgatatcagtaaaatcctgctgaaaaacggttttcactgccgttttatcaccacggttgatcgccgcagctaactgaccaatgccagaatcgctgccgaaacgatagcttttttgcagcaggcagagactgtcgcgcaaagatgccgcttctgtgccggttcctgccggaacgtgagtccccgtcaggcggcttagctgcctggcacgctcggcggtaaagcccgcgttggcataagcgcagatatcgcccagcacagccccagcctcaacgctggccagttgatcacgatcgccgagaaagatcactcgcgcatgatcgggcaaggcgtcgatcagtctgctcatcataggcagatcgatcatactcgcttcatctaccaccagcacatcaagatgcagcgggttaccggcatgatgacgtaaacgctggctacccggctgcgcgcccagcaatcggtgcaaagtgctggtatcttccggaatgcgtttcttttgttcatcggtcagcggtaactgtcgcaaagccttgccgagagattcggttaagcgcgcggcagctttacccgttggtgcagccagacggatacggcagcgttcgccgtcggccatttgaattaacgctgccagcaacttcgctacggtggtcgttttaccggtgccagggccgccggaaatcacgctgatccgccgcgtcagcgccactgccgccgcaactttttgccagttaatttcatcgcttactggaaaaagtttgtccagggtttgcgccagtagagcttcatcaacctcaatggcatgattcacttcgttgaaaaagcgtgccactgtgcgctcgttacaccacatgcgattcaaataaagacgatcgccacagaggatcatcggcgtgggttcatctcccctgctgaccgcttgagaagccagcaagcattcttcccaattttgtagctcaccgatttcactgacacaggtcgccaacagcggatggctcgcctcgttattttccagtcgactaagcggcaaacaaacgtgtccctctccggcatcatgacttaacagtgccgccgcgagggtgacggcaggatgttcatctcccgccacggtcagggcaaattgcacatccagcgggcgtagctgtttgtgctccacagcttccagtaattgcttttgcaatttcattacgcctcctccagggtcataccggcaaacatctcatccatcagggcaatcaacccggcgttgggtcgggttgtgtaaatcccctgttgcggatgttctttatcaacgccacgcaggaacagataaataacgccgccaaagtggtgctcatagtcgtaatcagcaatgcgatggcgcagataacgatgcagcgccagggtataaagctgatattgcagatcatagcggtgtgcctgcattgccgctgccatagcctgttgggtgtaagcgctactgtcttcacccaaccagttggatttatagtcgagcaggtaataacgcccttcgtggcggaacaccaggtcgataaagccttttaacatgccacgtacctgcatgaactccagcggcgggcagcctgcggatagcgggtcaaactggcggattaacgtatcaagctgactggcgataagcggttcactaatcggcagataaaactccatctccacctgtttattgcgggcggaaagttgactcaggcttacgccggtttcattgagaggtgcctggaggacagccgtgatccactcggtcaataccggttcccactggctttcaaagccgccgagttccagtttttcccgcacccagttcgggtcaaccggctgggtaaaatccaggtcttcaaacaaactgtgcaagaacgtccccggactcgcaccgcgcggaaactgatgtggtgttaacgtcggttcttcaacgacgctggcaacgcctgcagcatcgacatccagccgaggcatcaaatcctgggcgataccgtgaccacgctgttgcaaaccagagtagctggtgacgcgccagttatcgccgggcaatcgttgtaacgtcttcgcattcagctctgctgtagaaacatcattaacctgccagggttggttatcaccagtttgtgccgtttgccaggcaatatcatcatcgcataacgcttcaatacaggtgcgaagccctgccgcatcttgcggttcccctttttgcagcaaacgcccgagcgcactttggtggacgtcggtgtcaccttttttatcgccacgacggcgcaccagcggtgcaacgccgagactgcaatgccaaacgctacgtgtcagcgccacgtaaagcaaacgcagatcttccgccagacgttcggcctccgcgaggtcgacgctttctggcgcagcattaagatccagaactgcctcaaagctgtggcgatcgtgataaaacgcctgctcctggacgcggaaattggtgataaacggcagccagaccaatggatattccagccctttgcttttgtggatcgtgacaatctgcaccagatgtttatcactttcgagacgcatttgttggctggaggcattactgtctggctcgaggatatgttggcttaaccagcgtaccagcgcatgttcactttccagctgcgttccggcttcttgtagcagttcgctgatatgcaagatatcggtaagacgccgctcaccgcctgccgttgccagcaagttttcagcaatgttacgcgcgctcatcagcgcccgcagcatcggcataacgccacgtttgcgccagatttgccgataaccatcgaactcttcgactaccacatcccacgcatgttcgtcattgttcagcgtttcgatatccagcgcgttcagccccatcatactcgttgccagcgcactacgcagggtgttctcacgttcgggcgtcatcaccgcctgcaacaaccaaagcatttcctgcgcttccagagtttcaaaaacactgtcgcggttgctaaggtaaacggaagggatttccagcaacgttaaggcatcgcgcacctgggcggcctcctggcggctgcgcaccagcacactgatgtcgctagcacgcaccggacgcgcgtcgtcgccgttcatcagcaacgcttcgccccgctgtccggcttgtagccagtcgcggatttgcgcagcacatacctgcgccatggtactttgataatcgccaacgccgcagctttcgccttccatcagccacattttcatcgcaggctgtgtttcacctttaaatacaaaacgtaacgcctgatttttcccggcacttttcactggaataaacggtatttcgcgaaacatgaacgcgtcatcagtctggctgaaaagcttattcacgctgttcaccattcctggtgcggaacgccagttggtgtctaaagtgtagtgggcgtgaacttcgctacgcgccttcatataagtgaagatatccgcaccccggaatgcatatatggcctgcttcgggtcgccaattagcaacaatgcggtttccggctgatggtgccagatacggcgaaaaattcggtactgctgggggtcggtatcctgaaattcatcgatcattgccaccgggaatcgcgtacggatcgccgctgccaacacctcaccgctttcgctacgcagcgcggaatcgagccgacttaacatgtcatcaaaacccaattcgccacggcggcgtttttcacgcgctactgtttcgcggatctcagccaatgcgcgggtgatcaccagatcgcggatgctcaatggttctgcaagcagttgatcgatcgcctcaaacagtggatgtcgcggggtttcccccccggccttcgtgcgatcttctaagaaacgctgggagaatttttccaggctctccggcaactgataactgtttgtctcttcttctgcccaggcgctgatcttgtcgatccatttagcctgattgctacggttaaacttgcgtcgatcaataccagaagattcgatcagcgcatccagttcacccactgcgtcgcgccactgctgttttaccgtatcaatacgcgccacaatttgcgcgtgacgggaagccagcgtttcatcatcgggcggcggtgctttgataaccggcgcttcgccttgcagataacgattaatatcgcgcagcaacgcctgcggccctttccaggtttcaaagacgacctgggctatttcacgcggcagcgggtagcagtggcgacgccagaaatcggcgcaggcctggtagcgtagcagagactcatcttcaatcagctgctgctcaaacagcatgccggattcaaaggcattcaggttgagcatgcgctggcaaaagccgtgaatagtaaagactgccgcttcatccatctgccgttcggctaacaacaaccactgcgcggcttgcgctttatcgtcgatctcttccagcaggcgttcgtacagtggattgtcggtggtttcacgcagacaggcgatgcgcaactcgtggatattgctacggatacgaccgcgcaattctgccgtggcagcctcggtaaaggtgaccaccagcagttcttcaacggtcagcgggcggggaaaggcggcggaaccgcctagtccaagtaacaggcgcaaatagagcgccgcaatcgtaaaggttttgcctgtgccggcagaggcttcaatcaggcgctcaccctgtaagggcaagcgcaaaggatctagtgtctcggcgacatcactcattcttttcactcatcaggggcattgtttgctgcaacgcgctgacgttctcccacactttccagccttcagggtgtacatattcggctttcccgttctggctgccggaaatctggctcagaatagccatgccttgcggctcgaccaccgcctgatggaagaaatcagcaagtttttgcggcgtcagcagttttatctgggccacgattttatcacggctatcgaagcgcatattgccgcgatcgaaatctttacttaacttgcttgcttcttcgccgagcgtttgcggtgcctgcagcatctgggtaattaccgcctgctggatttgcgcaaactcatctggcttcatcgctcgcaattttgcctctgcggttgggaaaaacgccttgtaacgctcccacaagaaactaggctgtttatcattgctttgcaaaaggaagcccatgccccactgacgccccacgctcattggaaacgcaaacacggcatagcccaattgttcttcggtacgcaactgattgtagaaccacggctgtacgatctgccccaacagagagctataggcactgctggtgtattcatcgtagccagtcggtacaaataccgctgccagtgcggagtcggtgctgttaccggctttttcaaagatgacggattgttttttatcgaccactacatctttgtttcgacaccactcactaccatcagcgcccaactgtttttgcacatcgcgtgccagcgttgttgcctgggcctcggtcatgttgccgataaccataaactctggtcgagccccactttttaaggcgtcgcgataggccagcacctctttcaacgtaatggagggcaaaattttacgccgttcatctcggctgaagtacggcacttggctgagcatctgcgcgggcataatcgcctgctcaaacgctttacccttttctgcggaatccatcatctggttataccaggacttcgcctgctcaagctgatcttccgtagcggtatagctaaagtacccctcgagcaatgcctggaacagctgcggcagacgctgggtgtaaccattagcattaaccataaggccgttgttagcgttggtggaaaaacttatgccaccaacgctcgcctggttgcttaactgatcaagcgccagccctgcgagataatcattgagcgcaaacatcacctgattgcgggcgctgtccatggctttcggattacgcaaaatcaggctgacatcagctttgggctcgctggcaaaataacggcttggcgcatacaccacgcgcagattgctctcatcaacaatcagctctggatggtcgtatttcttctcactcttaatcaggctgaaatcatcaggaatataagggttaagctctggcaaagagagcgcaatgtcggcggcttttttctgccagtcggcgaaagtttgtgcgctgattttatcgacctgatacggcgcatcgacaaagtaagccgttttgttgtgcggctctttcgggctgatataccagatacgcgcattctgcggcgtcatcatcgccagacgttcctttactgctttagcatcgtaccgatcggcaatattgactgcatccagcgtatgctcaacaggaacgcgaatcatggtatctgccagccattcgacgtaatccatatcacgggtgatgctcggataacggaagtcgatatccagcacattcgccagttcatcgaagtattgtttatcaatgcctttttcacgtaacagattgagatagctaaaaattgccgccacaacctgatcgcgattagccaggcctttatcggttaaagacgcagagatcgctaatacgccgctgttgccgttgacgataggatcggagttggcgctaatgccctcaactaatccctgcttttgcagccagtcagaaagtgtacctgggctgcgattgccaatcagataggtaatcaattcatcggttttactacggaacttcgcactgttgttatcgatgcgaaactcaacgcgcaacactttacgcggcagcgcagggacgtaatgaatgataatgcccttttgcgcgtcggtgactaccggcacggtgatttccggttttttgctctctttgttcggcacgcgaccaaaggtgtccgccgccatttttgccaactccggcagcggtttattactgtaaataaccgccttcatcaaattggcggaatagtacttctcgtggaaatctttcagcgcctgctgcaccggattaccaggtttgtcgcttaaagtttcgaggttaccaccagaaaacttactaccggggtgtgccgggttaatggtttctgcgctgacctgtgccatgcgcatcccgtcacgcgtacgcgccatggttaattcagcgttcaccgcattacgctcacgttcggcatatttcttgtcgagcaaaggttcagcaatagcatcggccaggcggtctaccgcaccaggcaaggcgtcgttctcaacttccagatagaaagccgtgcgatacggcgcagtgctggcattgtgactaccgccgtgcattttgagatattcggccagactgtcagcctgcgggtactttttgctccccatcagactcatatgttcaaggtaatgtgccagcccctggtacgcctcgggatcttccaggctcccaacgggcaccaccagcgcgctgaggcttttaactgcctgcggatcagaaaccagcaagaccaccataccgttatccagacgtatagcctgatactggcggttatctttatcacttttacggatggtttcctgaatcggctgccatcccgtttctgcctgacttaagggtgcccaaagggcaactaacaacaataatgctttgaaccaggtgctgcggggcattcacggacctcataatcaacttaattttctgtccagattcaacacgttaacgcaaatcatctgccagaatttaatcttgtgctgcacgagtcagcctatgtttatataaccatcagtccgtgactggtgcgcatcataaagtaagcggatagattgcgcaatttttatacagcactcaactctgattaaagcgaaacagcggtaacaggaaacgttggctctgttcaacgatggcctccattgtctctggtgttaattgccgccagagcctttgataccagatatcatcaccttcgccacgcaccatcatgttgccttcgtaagcctgaaggaatttcgtacgggctttttgcaacgtggaatcgtcatccagcatggcatcgttttgcgcgtcataacaggtttttagccacgcgccgccactttcaggtaacaccagcaatggcgcggacattccttcacgatacccctcaatcagttgactgaggtaatgcaaagcctgttcggctgcaagcggcggaaaacgccactcgccgtctttgcgtagaaaaaggcgactttcaccattaccaccgctggcacagtagacaaggtgttccagccaaagttgcattccctgggccacacttaataaagagggacgccagcgcaacaggccatccggctgcacctgcggcaaccagccagttatctgcacaccgttgcaggcgagatcaatttccatactctgccccggctggcgacaggcaatgactctgtcggcaagctgctgcatctcctggcactgtgtttcccagaaaatttcaccaaaagcgccatacggtaaatcccctgccgctcggaagcggcggaacaagcgttcggcatcatcctgctcaaccagtgcattcaataactgctgattgatttgataacggctaagtccttccagaataaatggctcggtgtcggggatttcgctgtcttcagtacggaagttcacctgcaaacgcatctggaaaaatgcccgcaccggatgtgcccagaatcgttgtagcgtttccagcggcacggtttccggtaaggtaaacggcagcggctgaacaaattcagaatgtgctttaccagcctggctggccgcaggtagccattcacgagcatagctttgtcgttcgcctggctggtagttttgtggatcaaacggcatccgggtatggaggcaagtaagatgcgcttttacccttgcctcgctttcatcacagttgagcgcttcatcgcccggtagataatgactttgcccgatgtagtcgatcagttcctgcaccagtacgctcgggaaacgctcactgttatcctgaatggaacgaccgatatagctgatatagagtttttgctgcgcggaaattaacgcttccaggaacagatagcggtcgtcatcgcgacggctacggtcgccacgcttcggtttctggctcatcaggtcaaagcccaatggcgcaagctgacgtggataaacgccgtcgttcattcccagcaggcaaaccactttgaacggaatactacgcattggcatcagagtacaaatgttaaccggtccggcgagaaaacgctggctgatacgttcttgatccagacgctgtgccagttcatcacgcaatagactcagcggcaccgcgtcgccatactgcgcacctaaaccttcggcgataatcgcctgccattgttgttcgatcagcgtcatcgccgcttcggtttccgcatccggcaggaagaaggcgttgagcatatcgcgacaaaccggcaaccactcttccagcggacgctcctgtgccagcccgcgacgccagatgtttagctgcattagcagactagccagatgccccaccagttctgcaattaagccgctgctttcatcataaggtagaacgctttgccactcgccctgcgcgctctccatcgcgtagcccaacaacatacgcgtcaggccaaatcgccaggtgtgttgtccggtggcggggagttccagctcgcgaacgttgtcgtcatctatgccccaacgaatgccggattcgttgacccactggcgtaaataacgcagcccttcttcggtgatgtcaaaccgcgccgccagcaccggcacatccagcaacgccagcacatcctcactcacaaaacgactgtcaggcagacttaacaggctgataaacgcttccagtaccggatgactctgccgcgcacgacggtcggaaatggcgtaaggtaggtaacgatccgcaggtgcgctaccaaacacagcctgaataaacggactgtagctgtcgatatcagccaccatcacgatgatgtcgcgcggagtaagtgtcgggtcttcctccagcatcgccagcaggcgatcgtgtaaaacttcaacttcacgctgcgggctatggcaaacgtggaaggtgatactgctatccagtggatcaagcgggcgtttgttatcgctacgggaaaactcttcgatgttcacaccagcaacggcgcggttttccagttccagaatgtcagactgaatgttatgcagcaggttatctggcgtgacatcgacaaaggcgtccagctcctggctgctctccaggtcagaaaggagataaatgtagtcgcgcccaagcttaccccaactagccagcagcgggttgccgacatcctgttcaccatcgctgttaaagagctgcccggcattttcgctatcacgaaatagcggcaattcgcgatcttcaaaactgtgtcgacgctgacgggtcagcagtttcgccagataagcaggatctttaatatcgccccagtaataacggcaggggttggtaaacaggagatggatttcaatatgtttacccagcgcctgtagcgcctggagataaacaggcggtaacgcggaaataccgcatataaagacgcggctaggtaaccccggcgggcaggtcgtcgcggactccagcgtttcgataaagcgctgatagagattggcgcggtgccagcgcggttgcccgagttgatgggtatattccaccagcgccttccacaacggggcttgccaggcctgtgcttctcccagcccttcaaccaaatgtcctgtttcccactgtgccagccagtccggacgatagaccagatactggtcaaacaggtccgccgctttactggaaagctggaacagttttcgcttgtcgctatcgtcagtcagataatgccgcaacagggtaaagtcttcgcgctccagcaattgcggcagcagagtcatcagtttccagctcatgctctgtttgttaaaggcgctctctttggggatttccggtaacacccggacgaacatatcccagataaagctcgctggcagcggaaaatcaatgtttgccgcaataccaaacttttggctcagggtcatttgcagccactgtgccataccggtactttgcaccagaatcatctctggttcgaaaggatcgtccagccgttcgcgttcgacaataaactccatcaacgcttccagcacgtccagacgattggaatggtagacccttaacatagcggctcctgattactgacgattcgggcaatgcaggcgggtcatctcgccttctctgcccccgggactaactagcgtaacgctgatgctgacacatcccgcctggcttgtctgcattcggttgacctgccagttggcaggtgggctaatcgcgcgcagttgcgtttgctgccagccatgccgccagagctgttggtactggtttctgctggcaagactgttcattaatgttcgctggaaaccgcttaacgcagtgacaatcatcaccatcaacaccatcgccaacattacctccggcaggctaaagccttgttgattcttcagggaagcactcataacgccctctctttcagcggttaaatcagggaagctgacataacgccctctctttcagcggacaaaaatcgctccagccgcgtgggctaaaaacaatgtttccatcaatgacttcgcctgttcgccacaagctaacgccttcataaccggcaatcaataaggcttcattatctgccagtaaacgcaaacaaacctgggcatcggtttcagcgtactggctgcactgaactgctggctgcgtctgccagcagtgcatttttccccacgccagcgcgctctgaacgatggcctggcggcgcaaactctgactttccatgctcacgcgagaggcaaaactgcgatcctgttggctcattccttgtaatagcaaactacccaaaaccagcagcatcaggaccagagccagactgctaacacccttttcgcggttcacaggttgaatcctgtcacgctatagctggcattcaccacggtttgcggttcagacttactggcagcacgcatattaaccgtcaacaccgggctgaagccgctgacatcctgacgtacgacctgaaaagtgtcgataatgatggcatccggattagtgactttatcccagcccttaccttcacaggatgtcgcaccgcgtagcgtttccagcacatgctccttcagacgaaatccaatctggtcggactcttttaccggttcgcgatcccagataccgttactgttcgcatcccactgcacaatgacacagtcaccctgtccgacaatttccagcccttcgccggtacagatgccatgacaataacccgccctctggagatgcttcgcgacggtaaatacccgcagccagatttcatcttccagcgccagcttacgggtgctcgttaaactttcacgctgtaacgcaggcagaaagcgtgccgcccccagcaacaatacgccactgatcgccatagcaatcaacacttccagcagagaaaaaccttgctcttttacaggcatccttctgtttctccttgctgacaaagccggagtcttccccacgggctaaccaccagccaccactcgcccgtactgtttttgaagcgaatatgcccggcccatgcggtattgcgcaggccaaagaaagcaaggctaggtgtcaggtcgctcatttcgacttcgggccagcgtggcacaaagaccaatggactactgccatgacaggtattggccccagcagcggaactcacaaggcaccataacgtcccctccctgataacgctgatactgtggtcgcggttatgccagttggcatcttcacgtaaatagagcaaatagtcccgcgcctggctggcggtttgccatagccgttggctctgctgccagtattgccagccatagagtccacttgcgcttagcatgaccaaaatcagcatcgcgaccagcgtttcaatcagcgtataaccacgttgtgttttcatgccggcagtatggagcgaggagaaaaaaagacgagggccagtttctatttcttcggcgcatcttccggactatttacgccgttgcaggacgttgcaaaatttcgggaaggcgtctcgaagaatttaacggagggtaaaaaaaccgacgcacactggcgtcggctctggcaggatgtttcgtaattagatagccaccggcgctttaatgcccggatgcggatcgtagccttcaatctcaaagtcttcgaaacggtagtcgaagatggattcgggtttacgtttgataatcaacttcggcagcggacgcggttcgcggcttaattgcagatgagtttgatccatatggttgctgtacagatgcgtgtcgccaccggtccagacaaaatcacccacttccagatcgcactgctgcgccatcatatgcaccaataacgcgtagctggcaatgttgaacggcaggccgaggaagacgtcacaggagcgctgataaagctggcaagagagtttgccgtctgccacatagaactggaagaatgcatggcacggtgccagcgccattttatccagttcgcctacgttccacgcactaacaataatgcggcggctatccgggtcgtttttcagctggttcagtaccgtagtgatctggtcaatatgacgaccatctggcgttggccaggcgcgccactgtttaccatacactggcccgaggtcgccgttttcatcggcccattcgtcccagatggtgacattgttttcgtgtagataagcaatgttagtgtcgccctgcagaaaccacagcagttcatggatgatggaacgcaggtggcaacgtttagttgtcaccagcgggaatccatcttgcaggttaaaacgcatctgatgaccaaaaatggaaagcgttccggttccggtacggtcgtttttctgtgtgccttcgtcgagcactttttgcatcagttctaaatactgtttcatggttcctcaggaaacgtgttgctgtgggctgcgacgatatgcccagaccatcatgatcacacccgcgacaatcatcgggatggaaagaatttgccccatgctgatgtactgcacccaggcaccggtaaactgcgcgtcgggctggcggaaaaactcaacaatgatgcgaaacgcgccgtaaccaatcaggaacaaaccactgacagctcccattgggcgtggtttacgaatatacaggttgaggataataaacagcaccacaccttccagcagcagctcgtaaagctgacttgggtggcgcggcagcacaccgtaagtgtcgaaaatggattgccactgcgggttggtttgcagcagcaaaatatcttctgtacgggagccagggaacagcatggcaaacgggaagttcgggtcaacgcggccccacaattcaccgttaataaagttgcccagacgcccggcaccaagaccaaacggaatgagtggtgcgataaaatcagagacctggaagaaggaacgtttagtacggcgggcgaagataatcatcaccacgataacgccaatcaggccgccgtggaaagacatgccgccgtcccagacacggaacagatacagcggatcggccataaactgcgggaaattgtagaacagaacataaccaatacgtcccccgaggaagacgccgaggaagcccgcatagagtaagttttcaacttcatttttggtccagccgctgcccggacgattcgcccgtcgtgttgccagccacattgcaaaaatgaaacccaccagatacatcaggccgtaccagtgaagcgccacgggtcctatactgaaaatgaccggatcaaactccggaaaatgcagatagctactggtcatctgtcaccacaagttcttgttatttcgctgaaagagaacagcgattgaaatgcgcgccgcaggtttcaggcgctccaaaggtgcgaataatagcacaaggggacctggctggttgccggataccgttaaaagatatgtatatgatccgcgttataaccctccgcgaatcagcccgcccatgccgcgacgctccataaaggctgcaacctgatggcgaacttcggtcgccagttgcgcttccagactacgctgcgcaagattttctgcttcggcataatcaatgcgccgcagcaggtattttgcccgcgctacagaacgtccgttcatagacagatggcgatacccaagcccaatgaggattgccacgcacatgggatcgcccgccatttcaccgcacaaacggagatcgattccatgtatttccgcttcccgggcgatcatcgccagagctcgtaacattgcaggatgaagactgtcataaatgttcgccacccgggtattgttgcgatcaacggccagaatgtattgagtcagatcgttggtgccaacagagatgaaatcgacccgctttgccagatgcggcagcataaataccatactcggcacttccagcatgatgccgatacgtggtttgggaatttcgtaaccgatcatctcctcgacttcacgtccggcacgttcaatcaggcggcgtgcttcatcaacttcatcgaggcttgtgaccatcggcaacagaatattcaggttgcccgtagcggcattagcacgcagcatcgcccgcacctggatcaagaagatctccggctgatcgagcgtaatgcgaatcccacgccaacccaggcatggattctcttcgctgatcggcatgtaaggcagctgcttatctgctccgacatccagcgtacgcaaggtgacgggtttatcattgaacatttgcagcatcccctgatactgcgccacctgttcttcttcgctcgggaaaccactttgcagcatgaatgggatttcagtgcgataaagaccgatgccatcaatacggctgcccagtttttcttcatgttccgggcttaaaccagcattgagcatgacttttatacgctcaccgctttttaactgcgcgggtaaattgacgtcatcttccgccagacggctaagctcaatctcttcactaattagccgctgatattcttgcagcagtaccggctccggatcgaccagcaattcaccgcgatagccatcaacgatcagcgtcctacgatgcagcacgctaggctgaatatccgcgcccatcacggtagggatccccagcgcacgtaccatgatcgcagcatgggagttggctgcgccatctcgcacgacaacaccgactaagcgatcctggggcagctcagcaagcgttgtcgcactcagttcatctgccaccagaatgaaacgttccggccaggcgttcggcccttgattagcgtcatcaagatgaaacagcaatcgctgacccagcgcacgtaaatcgccagcccgctctttgagatagttatcacttagcgcggcaaactgttcggcaaatttttcaatgaccgtttttaccgcccactctgccacgctgcctttatcaacctcggcaaacaattcgcgacgcagccgggtgtcgctaagcaggtggctgtaaagatcgaaaatagccgccgtttctttttgtgcaccggcggcaaagcgtttgctgtagcggcgaaactcgtttgccgcttcttccagcgccccggtcagtcgttcgcgttccagagccggatccagcgtacttgcctgatacacctgttccattaaaggtaacgtggcatcctgccagccttcggcaatcgccacaccaggtgctgccggtaatgcgcggattcgcgtctggcgatattgcccaaacaaggcagtcaactggctctgagaaagaatagctgccatctgggtggcaagcgtcaccaggaaggattcttcactttcgtcatactggcgcaactctcgttgctgtaccaccagtacaccaagcaactggcgacgttgaataattggtacgcctaaaaacgcgcggaaacgttcttcttttacggaggggatgtatttgaagctggggtgcttttgcgcatctgcaaggtttatcggttccgccagcctgccaaccaggccgacgatcccttcatcaaacgcgagcgttacagtgcgaccgcgtggttttttcagcccccgggtcgccatcaggtagtaacaacgtcgatcatgatcggccaggtagacgctacagacctcggtatccatcgcaagacagatgtcggtaaccagaatatttaacgcctcattcaggcgtggtgcgctggctaccttttcgactatttcgcgcaggcgagtgagcataattggcgtgacttaacctcttttacgtcgataagcagatgcgttttgtggttttggcgtattttcctgcagactcatcaccacactcgcgaactctttcattaccctacggtagacatcacgtttaaaactcaccacctgtctgaccggataccagtaacttacccatcgccagccgtcaaactctggtgtactgctggtttgcatattgatttctgcatcgccgctcaccagctgcaagagaaaccatttttgtttttggccgatacaaaccggcttcgtgtcccaacgcaccaaacgtttcggtaatttgtagcgcaaccagttacgcgtactagcaaggattcgaacgtctttgcggcttaatcctacttcttcaaacaattcacggtacatcgcctgctctgcggattctccggggttgattccgccttgcggaaattgccaggagtgctgaccaaatcgccgggcccacattacctgcccctggcgattacaaatcacgatacctacgtttgggcggtagccatcgtcatcaatcaccggactacctcaaaataaagctttatatacgaatgattgtttcatactccaggaagacggtaaaccactctctgcagggcattacacactaataacaattgaataactcacagttatgtgcagagttataaacagaggaaggggtggatagccgtttttattcaccttttctgtggatagagttgtgaagaactacggaattactacgggaaaacccggagcattctgaataagcccgatatagacattttaaaatattcattatcagtcaatgcattacatgtaattttagtaatgaaaaagagtaattcgtgacccaggtcacacctctcatttacgggttggcgaaagatcaaccaatgccgtatttatccacagaatgtgccactaagttaagcactgaaccactaaaaactggagtttcgtcgcacgtcaaggctgtaaatggaaacagtagtggaggtttttcacagttatcccagctttctgtggataacatggtgtaagatcctgtttattttcagtgaccagatttggaaaacccgttgcagtgttgcgcaactcgattaccggcaacctaaaaagcaatataaatcagagaattgaacaacgcatgtggaaaaagttacactgcgaatattcggcacataattgctgtttgttttttaatcaaggtatcatgacatgtcccaacctcgcccactgctctctcctcccgaaactgaagaacagttgttagcgcaagcacagcaactttctggttatacattgggagaactggcggcacttgtcgggctggttacgccagagaatttaaaacgcgataaaggctggattggcgtgttactggagatctggctaggtgccagcgcagggagtaaacctgagcaagattttgctgctctgggcgtggaacttaaaactatccctgtggatagtcttggtcgtccgctggaaacaacattcgtttgtgttgccccgttaacgggcaatagcggggtgacctgggaaaccagccacgtgcgccacaaactcaaacgcgtactgtggataccggttgaaggcgagcgcagcatcccgctggcgcagcgtcgcgttggaagtccgttgctgtggagcccgaatgaagaggaagaccggcagctacgcgaagactgggaagaattaatggatatgattgttctcggtcaggttgagcggattaccgctcgtcacggggagtatttacagatacgaccgaaagcagcgaatgcgaaagcgcttaccgaagccattggtgcccggggcgaacggattctgacgctgccacgcggcttttatttgaagaagaatttcaccagtgcactactggcccgtcattttctgatccagtaaccatcgctttgacctgccgctttccgggcatataattaccgcttcatttttttggcagggctttttagatgttatttgcatggataaccgatcctaacgcctggcttgcgctcggtacgctgacgctgctggagatcgttcttgggatcgacaatattattttcctttctctggtggtggcaaagcttcccacagcacaacgtgctcatgcgcgccgtctggggttggcgggagccatggttatgcgtctggcgctgctggcaagtatcgcctgggttacgcgcctgacaaatccgctttttacaatattcagtcaggaaatttctgcccgtgatttgattctgcttctgggtggcttgttccttatctggaaagccagcaaggaaatccacgaatccattgaaggtgaagaagaagggctgaaaacacgcgttagtagtttcctcggcgctatcgtgcagattatgctgctggatattatctttagcctcgacagcgtgattacggctgtgggtctgagtgatcacctgtttattatgatggcagccgtggtgattgccgtaggcgtgatgatgttcgccgcgcgcagcattggtgattttgtcgaacgccatcctagcgtaaaaatgctggcgctctctttcctgattctggtgggctttaccctgattctggaaagtttcgacatccacgtaccgaaaggttacatctacttcgcgatgttcttctctattgcggttgaaagcctcaacttgattcgcaacaaaaagaatccgctctgatactccgtacgctctcctgcgggagggcgtactcactccttttaccctcacagtttaagattttcctgctttcaagatatataacgtcggtttataaacagactattatcataggtaggccaaatgaggataaccggatgaaaaaatgggcagtaataatttctgcagtcggactggcgtttgctgtttccgggtgttccagtgattacgtcatggcgaccaaagatggccgtatgattttgaccgatggaaaacctgaaattgatgatgataccgggctggtgagttatcacgatcagcaaggtaacgcgatgcaaattaaccgtgatgatgttagccaaattattgaacgttaacaaataaggtcagcatccggctggccttaagatttttctctttcccttttcccttccctctgccatttttatattccttatgtcgtgattataaaaaggaaacggctatgcaatatcaccgtataccccacagtagcctggaagtcagcacgctggggcttggcacgatgacgtttggtgaacagaacagcgaagccgacgcccacgcacaactcgactatgccgtcgctcagggcattaaccttatcgacgttgccgaaatgtacccagtacctccgcgccccgaaacgcaagggttaaccgaaacctacgtcggcaactggctggcgaaacatggcagccgcgaaaagttaattatcgcctccaaagtgagcggaccgagccgcaataatgacaagggcatccgcccggatcaggcgctggatcggaagaatatccgcgaagcgctgcatgacagcctcaagcgcctacagactgattacctcgatctttatcaggtgcactggccgcagcgcccgaccaactgcttcggcaaactcggttatagctggacggattctgcgcctgcggttagcctgctggatacgctggacgcactggcagagtaccaacgcgcgggaaaaattcgttatatcggcgtgagcaacgaaactgcatttggcgtaatgcgctacctgcatctggcggacaaacacgatctgccgcgtattgtcaccattcagaacccttacagtctgttaaaccgcagttttgaagtaggtctggcagaagtcagccagtatgaaggggtcgaactgctggcctatagctgcctgggtttcggcacgctgaccgggaaatatctcaatggtgcaaaacccgctggcgcacgtaatacgctctttagtcggttcacccgctatagcggtgagcaaacgcaaaaagccgtcgcggcgtatgttgatatcgccagacgtcatggcctggaccctgctcagatggcgctcgcgtttgtacgccgtcaaccgtttgttgccagcactctgctgggcgcaaccacgatggatcagctgaaaactaacatcgaaagtttgcatctggagttaagcgaagacgtattagctgaaattgaagcggtgcatcaggtttatacttatccggcaccataagattaacgccggttaaaaccggcgttaaatattaatgacggcgctgccagatccacagcgccgttattgccagcgcaaacagcgcaccgaagccaatgccaatgggcacgaccgggatgcctatcattaccgccaggctgtaaatgcccagcatcaacaacatggcgctgttttcgccaaggttttgtactgcaatcgcattccccgccccgacgctttttttaccccgctcctgtagcaacgcattgagcggaacgacaaaaaagccccccatcacgccaatcagcatcaacaaggcataggctggcagcagctcgtgttgcagggaaaaaatcagtaccaccacgccaatcaaaatcccggctggcatacagcgactcacggtttccagcgtaactaacttcgctgccgcacctgcgccaaccacgataccaatcgctaccatcgcgttgagataggtgggcgtagcgttatcggtaatgcccagcgccaccggtacccacagcaccaacaggaaacgcagcgtgacacccgctccccagaataaactggtgcccaccaggctaaaacgcgtttcaccattgcgccataggctggtgcaggcattcaggaaactgcgggtcatgttgatgagattccaggactgccccggacgcgccgccgccagtttgggaatgtagatattggcaacgaccgcaccaccgtaggccagtgcgcatgcggccagggcgacgaggacatgccagtcagccagcacaccaccggctacggaaccgagcaaaatcgccgctatggtagaagcttccattaaaccgttagctttcactaacttactacccgtggttaattcgccgagaataccgtatttcgccggactataggctgcagcaccaacacccaccagcgtatagccgagaaacggattgataccaaagcagatactggctgcgcccagcagcttcaggccgttggcaaacatcatcacccggcctttggcgaagctatccgccacctgcccgacaaacggcgcaaaaagaatgtaagcacctacaaacaccatttgcaggatgggctggctccactccggatagaactgcgctttcagtaacgccagagtggcaaacagtagggcattatcgccaaacgcagagagaaactgcgccacgataaccgctttcatccccttgctccacaagctagtgttagtgtgcacactctcactcatcgtgttgttccgcttcgtctacccagcttttcaacgtgacaaagtcaggtttgccgctgccaagtaatggcatctgtttcagatagcgaatatcgcgcggtacagcaagctccggcacgccgtgctcgcgggcatactgttgcaacttatcgcgcgtcagttcgttatctgtggtgaaaagcaccagtgcctcgcctttgctggcatcgctcttaatcgcagtggcatggactttatctgggctaacaccaagtgccagttgttccaccatttccaggctcaccatttcgcctgcaattttggcaaagcgttttgcgcggccctgaatctgcacaaagccctgctcgtcaaaacgcacaatatcgccagtgtcataccagccgcgctccatttcgccgcgaacattctcggcggtgggcacttccagtacacctggcttctccacccgcagatagccgttcattatgttcggccctttcagttgcaggcgtccgccctcttcgataccagggacgctcaacaggcgcgcatccattcctggtagaatacgccctaccgtaccgggtttcgccgccatcggtacgttgatagaaacgacaggcgcgcattcggtcacgccgtagccttcaaggatgcgcaggccaaatttatcctgccaaagctgtttggtactttcttgtaatttttctgcgcctgccaccacatagcgtagacgatagaagtcatacgggttggcgaaacgcgcgtagtgaccgaggaaagtgctggtgccgaacaacacggtgcaactgcggtcatacaccaactccggcacaatgcggtaatgcagcgggcttggataaaggaacacttctgcacctgtaagcagtggcgtaaacaggcctaccgtcagcccaaaggagtgaaacagcggtaacgcgctcataaagcgatcgttggtggtgaagtcggcaatcgttttaatctgctcgacattcgccagaatgcttttatggctatggacgacgcctttcggatggccttcagaaccggaggtaaaaaggatcagcgcctcttcttccggctgctgtttaacctgtgccagacgcggcatcagcaaatgagcgaagatccatactttgtcggcagtggtgacatctgcttttaaatcttccagatagacccagcgcacctgagtaagttgctccggcagatgccagagtttgcctttatcgagaaactggcgggaagtgaagatggttttgatttcagccgccgtaatagcactggtcagcccttttaccccggcagtgtagttcatcattgcgggcatgcggcgacgggcgatggccccaaaaatcactgccgcactgatgcctgcattgggcagcattaagccgatgcgttcgccttcaacactgtatttttcaaggatgcgtccaacaaacagcgttttcgtaagcaatttgcgataggagtctggggtaaagttgacgtcttcgacacatttcttcccggctccgaagcggtacattgcactcagtaaagattcgtacagcgtttcacgcgggcgcaccgccattcgcgcttccatcattatttgatgcagcatttcgccagcgattttgcgacggtcacgggcacgcggcgcatccggcatcgccacctgcgttggtggcaaaatatgcagagtaatttgcgggaacaagcgacgtttaaccagacctttcaggcggctgaagtgcgtaagttccgccccttcaatacgcacaggaataaccgtcgcaccagacttcgccgcgacaaaacccgcgccatcgtagattttcatcaggctgcctgtcgtggtgatgcgtccttcagggaaaatcaccactggtcggccctgttccaccagacgtaccagatgtttaatagccataggttgcgtcgggtcgagaggaacaaagtcgataaaacttttcagccaacgcatataccactgttggcttatactggtgtaaacggcaaacactggacgcacaggtaaaaacagtccaagcaaaatgccatcaataaaagagacgtgattaggcgtaattagaacgcgctcgcccttcagtgcctgggtgtcacccgtaacgcgaacgcgatacaaaacacggcacaaatttcgaaaaaagctaaaaagcattccaactccctttgctctgattcagtaaaagcgaatggagggagattacacgagataaagaacgcgagcgacagtaaattaggtgcgaaaaaaaacctgcgcatccgcgcaggttggtgcaagagacagggtacgaagagcgtaccgaataatctcaccaatcaatacctctgggatcttgattgtggtctgcacgacgactcttcgccagcgagaaaacgcaaaggaatgaagggaaatgcaacgaggtgtgtaaattgtcggttactgttacagattgatgaccggcaaaaaaaacctgcgcatctgcgcaggctggtgtaattcatgtgctcaacccgaagttgacttcacctatcaatacctctgggatcaccactttagcaacctgaagccaaacgccaccagcggtcaatcgcaacagcgtttcgcaaagtgtaaccaaaggtttgcaatctctttttttgtcttacttatttgcgtttggctcacattcccacgatgaaaacacgccaccccttgaaccaacgggcgttttccgtaacactgaaagaatgtaagcgtttacccactaaggtattttcatggcgaccataaaggatgtagcccgactggcaggcgttagtgtcgccaccgtttcccgcgtcattaataatagtcccaaagccagcgaagcttcccggctggctgtgcatagtgcaatggagtctcttagctatcacccgaacgccaacgcccgtgcgctggcgcagcagaccactgaaacggtcggtctggtcgttggtgatgtttccgatccgtttttcggtgcaatggtgaaagcggtcgaacaggtggcttatcacaccggtaattttttattgattggcaacggttaccacaacgaacaaaaagagcgtcaggccattgagcaactgatccgccatcgctgtgctgcgttggtcgtccatgccaaaatgatcccggatgctgatttagccagtttaatgaaacaaatgcccggtatggtgctgatcaaccgtatcctgcctggctttgaaaaccgttgtattgctctggacgatcgttacggtgcctggctggcaacgcgtcatttaattcagcaaggtcatacccgcattggttatctgtgctctaaccactctatttctgacgccgaagatcgtctgcaagggtattacgatgcccttgctgaaagtggtattgcggccaatgaccggctggtgacatttggcgaaccagacgaaagcggcggcgaacaggcaatgaccgagcttttgggacgaggaagaaatttcactgcggtagcctgttataacgatagtatggcggcgggtgcgatgggcgttctcaatgataatggtattgatgtaccgggtgagattagcttaattggctttgatgatgtgctggtgagtcgctatgtgcgtccgcgcctgaccaccgtgcgttacccaatcgtgacgatggcgacccaggctgccgaactggctttggcgctggcggataatcgccctctcccggaaatcactaatgtctttagtccgacgctggtacgtcgtcatagtgtgagtactccgagcctggaggcaagtcatcatgcaaccagcgactaaccgcagttaaagcaattccagcgccagtaattcttcgatggtctggcgacggcgaatcaaccgcgcctgaccattatcaaacagaacttctggtaacagcggacggctattgtagttggaactcatacttgcgccatatgcccctgtatcatgcagtaccagataatcacctgccttcacttccggcaaggcgcgggtttcaacatttcccccttcctgctgggtaaagacatcgccgctttcacataacggtccggcgacgacggtttccaccgttggcgcgtgttccagagaacgaccatcagctgccagggcactgatatggtggtaactaccgtacattgccgggcgcatcagatcgttgaacccggcatcaaccagcacaaagtggcggctccccatttgtttgacgctccgcacctgagtaattaatacgccagactgcgctaccaggaagcgacccggttcaatttccagtttcacagggtggcccaaatggcgggcgatttgctcacgcgcggcattccacagaccataataatgttcggtatcaaccgcctcttcaccctgttgataaggaacagaaagcccaccgcccgcagaaatagcctgtaaatcctgaccgaattcgatgacctgacgcaccatagcaccacacacctgttccagatgggcataatcaacgccagaaccaatgtgcatgtgaatgccgaccagctgcagatgatgacgttgtatcacgtccagtgcggcgggcagatcggtgtaccagataccgtgcttgctgttttcgccaccggtattggttttttggctatgtccgtgaccaaaccccggattaacgcgcagccatacccgatgccctgggctaacctggcccagttggtcgagcatatcaacagaacccgcattcaccggaatttgcaattcactgacgcgttcaagcgtcgcctgatcgataacatctgccgtaaaaacaatatcatcggggtgcgtttgcggattgtaacccgccgccaacgcacgctctatttcgcctaagctgacggaatccactttcacgccctgctcacgcattaagcgcaaaatatgaatattggaacaggctttctgtgcaaagcgcaccacatcaaactgtttcagcgctgcaatctgccgacgaataatttgcgcatcgtagacccacaccgggcagccaaattcagcgggcaaacgcagcagattttcggcggtgagatcggtatcggtgctgaacagactatgtggcataacaaactccagataagtgcttttttatgattacgccacatcataaaaagaataaaaaatatcgatttatgtcgagtctatgcaaaaatgatatggattaccggattgcgagagagcgctaatggccgccgttaacttacgtcatattgaaatttttcatgcggtaatgaccgccggaagcctgactgaggcggcacacctgctacacaccagtcagccaaccgtcagccgcgaacttgcgcgctttgagaaggtgatcgggctgaaattgtttgagcgcgtacgtgggcgattacatcctaccgtgcaaggactgcgtctgtttgaagaagtgcaacgatcctggtacggactggatcgcattgtcagcgccgcagaaagtctgcgcgagtttcgccagggagaactgtctattgcctgcctgccggtctttagccaatcttttttaccgcagctcctgcaaccctttctggcacgttatcccgatgtcagcttaaatatcgtgccccaggaaagtccgctacttgaagagtggctcagcgcccagcgtcatgatttaggactcactgaaacgctccatacgcctgcgggaacagaacgtaccgaattactctctttagatgaagtgtgtgtgttacctccgggtcatccgctggcggtaaaaaaggtattaacgccggatgattttcagggtgagaactacatcagcctttcccgtactgacagctatcgccagttgctggatcagctatttactgaacatcaggttaaacgacgcatgatcgtagaaacccacagcgccgcgagtgtctgcgcaatggtacgggcgggggtaggtattagcgtggttaacccgctcaccgcactagattatgcggcaagcggtttagtggtgcggcggttcagtattgcggttccgttcaccgtcagcctgatccgccccctgcaccgcccgagtagtgcgctggttcaggcgtttagtgggcatttacaagcggggttaccgaaactggtcacttctcttgacgctattttgagcagtgctacgacagcataattagctcagcataaaagcgacagcatcctcggcatggatcgccgcggtatcaaacacaggcaaaacactgcgctcttctggcaccagtaaaccaatttctgtgcagccaaaaatgacgccctgtgcgccctgttctgcaaggcgagcaatcacttgcgcacaataagcgcgactcgcttcggtaaattgccccagacacagttcttcaaaaataatctgattaattttcgcccgttcatccgcttcaggaataagacaattgatggaaaattgttccgtcagccgcccgcgataaaaatcctgttccatggtgtaacgcgtacccagcagcgccacacgagtcattccggccccggtaattgcacgtccggtggcatccgcaatgtgtaagaaaggcagagtgcaacgactctcaatggcatccgccactttatgcatcgtattggtacatagcacaataccttctgcgcccgcccgctgtaagccaagcgccgcctcagccagaatgtccccggttttatcccattccccgcgacgctggcactcttctatttcatgaaaatcgacgctatgtagcagcacttgcgcagagtgaagcccaccaagccgctgtttaatgccttcatttatcaaacgatagtaaggaatggtggattcccagctcattcctcccagcaaaccaattgttttcattcctctctcctgatgtgtgttaccgcaacaaggctgaataaggaacgagacaaacgcctcaacggccaagtgcccaatctctattaacgaaaaaagggccggatgtacagcacatccggcccgtgaaatcagacgccgatatttctcaacttctcgcctgccatcagtttgcgttcgatatgttccagcgtgacatttttggtttccggaatgagccagaaagtaatgcccacaaacgcaatgttcagcgcagtgtagagccagaacgtaccggcagcgccaatgctatcaagcagtgtcaggaaggtcgcgccgataatcatattgctcacccagttcgtggtggtgctacaggtaataccgaaatcgcggcatttcagcggctgaatttcagagcacaggatccacaccactggcgcggcgctcatcgcataaccggcaatacacatcatcgtcatgccaacagagagccaggacaagccactggaagccgtaccgttatcaaactgcatcaggcaatagcccagcaccagagtgcctaacgccatcacgctgaaaccaattttcagagccggtttacgccctgctttatctaccgtaaacaccgcaataaaggtggcgaacataaaggtcagccctacgaccagagtcgcaatcatctgttgttctgtggtcgtaaagcccgccattttgaagatacgcggcgcgtagtacatgatgatgttcataccggtaaactgctgcatcgcctgcaacaacataccgagaaacacagcacgacggacgttacggttgatcttaaacagtgcccaaccgccctgttttaacttcaggctttcacgaatttcgttgagttcttctcgcgctttttcgctcgtatcgcgcagcatacgcaatacttcttccgcctcaatatgacgccccttttccgccagccagcgcgggctatttggcaggaagactaccagaataatcagcagaactgctggtaaagcaagaacccccaacattgcgcgccagttaccgctataactgaacgctgtatcggataaaaacgccagcacgatgccgagtgtgaccatcaactggtacatactgatcatcttaccgcgaacgttttcacttgccatttcagaaagatacagaggagcggtgtaagacgcgatcccgacagcaatgcccagcaccacacgagcggcgattaacatctctacgctggtcgcaaaagcggaccctatagaaccgagtacaaacaggatggcccccgccatcaggctgtatttacgccccaggcggaagctcagccaaccattaaacagcgcaccaattgctgcaccgagcatcatgctactaaccacccattcctgcaaacgactggtcagcacaaagtgatcggtaatgaacggcaacgctccggcgattacgccgatatcaagaccaaataacaatcctgcgaccgcagcagctacgctaacaaacatattcatacgccgcgtatcccgcaaagaacgtggcgttaaagcagattccgtattgatagtaaccattttttcctgccagcagagagtaagacatagtgaaaaaatacgtgaacaactcacgcaggtgtcaggtcggaaacagcataaatatggattaaattgctgcgacatgtcgttatgtgatggatattccaattttcaaattaagttgaattattgagattattattaaccacctaattttacagcagataaaattcataaagttcattaattgataattaatatggattatttcataaccatgatatggattatgatgatctacaggtataaaaaaccctgccatgcggcagggtcataaaagtaagaagaatgaattaacgcgccagccaaccgccatccacggcaatggtataaccattcacataatcactagcgctggaggcaaggaacactatcggccccatcaggtcactcggcagtccccaacgaccagctggaatgcggtcgagaatttccgcgctacgttgttcatctgcccgtagttgttgagtattgttggtcgccatgtaacccggggctatcgcattaacattaatgttgtgtttagcccattcgttcgccatcaatcgcgtcacacccatcacgccgcttttacttgcggtataagaaggcacacggatcccgccctggaaggagagcatactcgcgatattgataatcttgccgccattgccttgcgcgataaagtgtttcgccgctgcctgagacatgaagaatacgctcttgatattcaggttcatgacatcgtcccagtccttttcgctgaactcgagagcatcttcgcggcgaatcaatccggcgttattcaccaggatatcaatatgaccaaactccgctaccgcgcgatccagcagtgctggaataccatcaatctttcgcagatcggcggtcaggcttaaaaaacgacgccccagcgctgtgacctgctcgatggtttcagtcggttcaacgatgttaatgccaacaatgtcacagcccgcttgcgccagccccaacgccatcccctgacccagtccagtatcacaaccagtgacgaccgcaactttaccttcgagagaaaatgcacttaaaatcataacaataccttattcgtttatgcccacaattagcgcaaatctttaacggccacatggtccatatcatcaaagacctggttttcaccgaccatgccccagataaaggtataagctttggttccgacaccggaatggatgctccagctcggggagatcaccgcctgctcgttatgcatcacaatatgacgcgtttcttgcggctgccccatcatgtggaaaacgcaggcgtcatcatccatattgaaatagaaataaacttccatccggcgctcgtgggtgtgacacggcatggtgttccacaagttacccggagccagctccgtcagccccatactcaattggcaggtttccagtacatccgggacaaaatatttgttaatcgtgcgacggttactggtgaggttatcgcctaacgtgactggagatacttcgtccggtgtgacttttttggtgggatacgtcgtatgcgcgggtgcgcaattgtaataaaacttcgccggagtgccggtatcaatactggcaaagacaacttcttttgcacctttaccaacatacagggcgtcgcggtgaccgatttcatagcattggccatcgacagtaatcgtaccggcaccgccaatattgataacacctaactcgcgacgttcaaggaaatagcttacgccgagttgtttaccaacttccccgccaacggaaaccgttttagttatcggcataatgccgccaacaataattcggtcaatgtggctgtaaaccatggtgtactcatcggcgacaaataccttttcaaccaaaaattcattgcgcagcccttgggtatccagcgtttttgcgtgcgcactgtggatgctctgtcttacgtccacatcaacctccgataatcagtgaagcgtgaaaatagaaaacgatagtgaaacactgtttcgttttctctataaagggatgatatgcccatgggctagggttttcaattaaaaataaaacaatgtttcatttttaagttaaggattaaaaaaagtgcagtgtcgatcacgaatatgtcatgagaatggaaaaatgagggagcccagaaaatgtatgtcgacttgccagccatcattattcaacagattaatgacggcagatatttatcggtaaggaggaaatgcagagttattcgtcacgttcaatggtcaatgccacaccctggcccccgccgatacaaagcgttgccagtcctttgcgggcattacgtttcaccatttcatgaaccagagaaaccaggattcggcaaccggaagcgcctatcgggtgaccgagtgcgatcgcgccaccattgacattgacccgacgctcatcccactcaagcatcttgccaacgctaagcgcctgtgcagcaaacgcttcattagcctcgataagatcgacttcagccaactgccagcctacacgctccaggcaacggcgggtcgcatacaccggcgcaattcccatcaatgccggatctacaccaacgctggcaaatgcgcgaatgcgggccagcacgggtaaattcaacgctcgtgctttggcttcgctcatcatcattaccgcagctgcgccatcgtttatggaacttgcattacccgctgtcacagaaccgagactatcaaaactaggatttaaacgggctaagccttctgcgctggcgtcagtgcgtggctgttcatcggtatcaacaaccaacgtctgcccgttactttgggtcattaccgggacgatctcatctttaaatcgtccggcgtcaatcgccgctcgcgctttttgttggctgctaagtgcgtaagcatcctgcaactgacggctgatgccatattcgcgagccagattttcggcggtgacaccaatatgataatcattgaaggcatcccacaacccatcatgcacaagactgtcaaccaactggctattgccaagctgtgcaccggtgcggctatcagtcagaacatgtggtgcgcggctcatgttttcctggccaccggcgatgacaatatcagcctcgccacactgtatcgcctgagtagccagatgcagtgctttaagcccggaaccgcaaacgtcattaatagtgattgcagaaacgctattaggcagaccacctttaatagcgctttgccttgccggattctgccctgcccctgcagtcaacacctgaccaagaattacttcatccaccgcatatgcaggaacgccggtacgttctattaacgctttcacgaccagactaccaagttccacggcggaatgacccgctaacgcaccacgaaagcagccgataggtgtccgtaacgccccgacaatcacaacgtctttcatcacaacctcgcaccaattaacagtgcaatagtaaatgattgttaattacagttatcttaattgtttaaaaaaagtgatttttatcacaaaggaaatatgcctgagcagcagtcagagacataactggcacgtaaggtttgcaaccactaacccaccaatagaggggtagatagggcgttaatctcccatacttaacctggtttatggtaaattgccctccattttgtttaatttgtagatgatacgttcagataatgtctaatatttggtctaaagaagaaactctgtggagtttcgcgctctacggcacagccgttggtgcaggcacgctcttccttcctattcagttaggtagcgcaggggctgtggtcctgtttattactgctctggtcgcctggcctttaacatattggccacataaagccttgtgccagttcatcctcagtagtaaaacaagtgcaggtgaagggataacgggcgcggtaacacactactatggcaagaagattggtaatctgattaccacgctgtacttcatcgccttttttgtcgtcgtgttgatatatgcagtggcaattaccaacagtcttacggaacagctggcaaagcatatggttattgatcttcgcatccgtatgttggtgagtctgggtgttgtattaattctgaatctcatttttctgatgggacgtcatgccactattcgggtaatgggatttttggtattcccattgattgcctatttcttatttctttccatttaccttgtcggtagttggcaacctgatctattaacaacccaggtagagttcaatcagaatacccttcaccagatatggataagcattcccgtgatggttttcgcctttagccatacgcccattatttctacgtttgccatagacagacgtgaaaaatatggcgaacacgctatggataaatgcaaaaaaattatgaaagtcgcttatctcatcatctgcataagtgtactgttctttgtctttagctgcctgctttctattccacctagctatattgaagctgctaaagaagaaggggtcaccattttaagcgcgctttctatgctgccgaacgccccagcatggttgagtatttccgggattattgtcgcagtagttgcgatgagcaaaagtttcctgggtacgtactttggcgttattgaaggtgccacagaggtcgtcaaaacaacactacagcaggttggtgtaaagaaaagtcgtgcatttaaccgcgcactaagtattatgttggtaagcctgattaccttcattgtttgttgcattaacccgaacgcgattagcatgatttacgcgatcagcggcccgctcattgccatgatacttttcatcatgcctacgctgagtacgtatctcatcccggcgcttaaaccctggcgttccatcggaaatctgattacgctgatcgtgggtatcctgtgcgtaagcgtaatgttctttagctaatatcagttgtggatggttcaaaattgctacaattttgaaccattccatttttcataatattcatttgttattattccaccctatcacttctctcgtcatatcctagtattatcagttagttaaacacacaaagagatctgaacatcttaaataagactatttaagatgcataacttagattcgcaagatatcttctggtcattcaaaaacaatttgcgatatagatattcttataccatgagatagttatctggaccgctctcaaccatgcaagattaaatcagtgaaacataatcatatttgataacgagaaatgcatttttaaatgccttactcagaattatagcaaatacagattaatcgcaatttttcccggcaaaattacaaaatcatggtgtattgacatcatcaataaccaatgaaattatgcaattatatacggatagggaggttcttaacatggggctttgtagtcgttataaaagtcttacatgcaatagttgcagtatgcattgccaaataatgccagaagagagtccgcgtttgcagtattgcgcaaacagctgtttttgtatgtggcccgaagaaagtagttattttaatcgtggtgtggtagaaggtatcttaacaaaaaaccacaatgcgagattaagcggatatatttttgtcgattttagtgtaagttttttacgtctattccttgaaaaagactggattgactatcttgcaagtactgacatggggattgttttagtcagcgaccgcaatatgcaaagcttagctaattactggcgaaaacacaacagtgcaatatctgctgtcatatataatgatgatggtcttgatgttgccaatgaaaagatcagacaactatttattggtcgttatttaagttttaccggaggtaacacattaactcagatggaattcaccataatggggtatatggtttctggttataatccatatcagattgctgaagttctggatatggatatccgtagcatctacgcgtacaagcaacgaatcgaaaagagaatgggtggtaaaataaacgaattatttattcgtagtcatagcgtccaacattgatactcaacgaccagccagaatcatactctgtttatacgggcatttattgaaatgtccgtattttataaataggccgtcccctcaagagtaaacaccatagtatttaaaaccatcacacgaaaaattcagaagcattacgaaatatgaatttacaaacaatagtggcataaatgttaaccatgttaatttacgtaaagttttacgttgcaacattaaagcctcatttcaatcatcatgataaatataaaattaatatatatttatgccgtaaataccaatatacttagcaaactatgtgatctccatttcgattgatttagtgtttattgacgtatgtactggattattaacgataatatcgagttctggcctgagcaccgaaaattaataagcgtacataacgccgatcttaacgtcgttctgacaacgccagccagtcgatgtttaagtcttctacttgaagcttttcctgatgtggttgcacaacaagattttttcaccagagtctgggaagaagaaggtatgcgtgtgcctactaacacgttatatcagaacatatccattatcagacgcggatttcgcgctgttggtgatactacccacagcctaattgcaaccgtgccgagaagaggattcaagatccataatgacattaacatacaaaatcatgtaataaacagcagtacagacgcacatacacacaatgccccacctgccataaaagttaatgcgggatacaaagagagcattggtggcgcaaagaatttcaataacaaaatcctcaaacatataaaaagtcatctaattatgttgagcgcatttgtcataggcgcatattctgcatattggctatggaataataatcaaccgaagccatttttcaaggattacaagactgttgcggaaattaatggctgccattttaatgtaacagaagatacaattgatgggttgaaagagttcgataaatataaaacacggatactggatagcgggattaactgtaaaaaacatccgtggttatacttccctcttgcaaaatccagtccggggatgattgttatggcatgcaataaaaactataaccaacatgaagtggcaaactgtttaaccctgtcttaccgtgaggttaatcgtgattgattataaaaaaaacttattatttattttagtttttatcagtgggtttattctcttcactgtctattcttacactgcagaaaaaatgatatataacgaaacatgcactgcaaattgggtaatttttaatgaccagggacgagcaaatcttaccatcgactttatgtataacaaaaaaaataaaacaggaactgttgcgttgagtggaacctggcaacaaggtaacagagaaagtaaaagtatacggcgaaatattgaatacacatggattgaaaactatgacacagcccatttaacaagtaagaaagttaataagtttgagattatggatcaagttgatgatgatagacttgcacaacttattcctgatttttatgtctttccagaaaaaagtgtaagctataatatactaaagcaaggtaagcatgcttttattttgagcattggtaacagagcaataatgcattgtgcaaggtaaactaaaatagataacaaaaagatggaacctcgttaatcataaaacaataaaattaaatattctcgcagtatatggcagtctaaagcatcaaagatttgatcaacatctttcattttagacatctccttgcaatgtaaaatatcatgtatcaacaacatctggtgcaaatccaactgtcgaactcgacattcatcttagctcgattattattccttcgtacagtgcttgtaaacaatacagaaagaggattattaagaaccagtttactcagactatcaatagaggaaaggactaacgtttctttaaaagaattgatttcatcatctgttaaactaaactcatcattgacagatcgactgatataactgtttttaactttactctttacgttgactttattgacagaattaacattcacatatctactatttaatgtccaacttgttgtttgcgtgagaacattctcagcattaaggaatttttttaacggaatccttggtttctttttgctgtcgctatttacaatatcatgcatatagaccatttcatgaatctggctaaattcaatgtccattgtatacctcacatttttaccgtgactcgatgttactgttcaataatcaccttccatcaatactaaaattaatacccctaatgtgccgataacaaatatagtcattctacgtaacgtctccataaggtgatatttgacattatcagaagctgcgaattcggattttgctctaatcaaatgagagaaatgtaaaatgaagccacgaaatattaataatagcctaccactgcaaccattagttcctgatcaggagaacaaaaataagaaaaatgaagagaaatccgttaatccagttaaaatcacaatggggtctggtttaaattatattgaacaagaatctcttggaggaaaatatctaacacatgatttgagtataaagatagcggatatttctgaagagataattcagcaagcaatattatctgctatgagcatatataaatttagcataacagatgatttaatgagtatggctgtaaatgaactcataaaactgaccaaaatagagaataatgtagacctgaataaattcactactatatgcacagacgttctatccccccgcgtcaccagacataataaagaaaaaaacaaacgacattctacccttctcaaaaatcccctttttaattttcattgaaaaaatggcaattgatactatgaatccaggtcatacacattaaggcatttatgtaatgtcgtaattaagataactaataaggtgaatattagtaaaacaactaatgatgttattagtttgtagtgaacagtacttttaccaataatgaaaaatataccataagcaatgcaagcttaaaactcataatttaaaaaagataaatataaaaatatcaatgagtcaatcaataataatttggcatcacgagacacatcacagaggaatattatgagcacagaaacaattgaaatattcaataatagtgatgaatgggcaaatcaactaaaacacgcattaagcaaaggagaaaatctggcattactacatggtttaactcctgatatccttgatagaatatatgcatatgcattcgactaccatgaaaagggtaatataacggacgcagaaatttattataaattcttgtgcatttatgcgttcgaaaatcatgagtatctaaaagattttgcaagtgtatgtcagcccaaaaagaaatatcaacaagcatatgacctttacaaactaagttacaattacttcccgtatgatgactatagtgttatttatcgtatgggtcaatgtcagattggggctaaaaatatcgataacgcaatgcaatgtttctatcacattattaacaattgtgaggatgatagtgttaagagtaaagcgcaggcatatattgaactcttaaacgataatagtgaagataatggctaagcattacaatcatttggttaaatttgctggttatagtgcagttaaccactataaccagcacctcttatgttttcttaaatcagcatcttaaaacagttaagagcatactataaatcattatttttcaatgcgttagagaacaatctactttatcaaaattgaataaggctatttcagattacatcactgaattcctaagataaattagtgaacacaaccatagatatgtcaaatgtaatttcctgtagcgttaatgacacataaatatgaatagccataatttctattgcttaagcaggatgcaagaaaccaattttttcatagaggttaactaatggacttagaaaataaattcagttatcattttcttgagggattaacgctcacggaagatggaattcttactcaaggaaatgagcaagtttatattccacagaaagagttaggtgtattaatagtattacttgaatccgctggtcatgttgtactgaaagatatgatcatcgaaagtgtatggaaaaatattattgttagtgacgagtccctgacaagatgtatctattctttgcgctgcatttttgaaaaaattggctatgatcgttgcatagaaacaatctaccggaaaggttatcgtttcagcgggcaggttttcaaaactaaaattaatgaagataatactagtgactattccatagctatattccctttcactactagtttgaatacactggatccattaatacttaatcaggaattagtgcaaatcattagtaataaaaaaatcgatggtctctatacctatccgatggctgcgacaaatttttgtaatgatcacatatctcaaaatagtttcttgagcagattcaagccagattatttcgttacaggaagaataaaccagaataatgcagtgaacactttatacattgagttgatcgacgctaaaaaccttttcctcatcgccagtaatcatctccctgttgatgaactacataatacaagtcaatttattatagataatatccttcaaacggtacataaaccagaacgatctgtaagattagctaagcaggaccaaggatataagaatcattatttaagtgatgaaatgttagccggaaagaaagaactttacgacttcacccctgaaagcatttacagggccatgactatatttgatagattacaaaataaaagtgatatacagacgctaaaaacagaatgttattgccttctagcggaatgccatatgtctttggcacttcatggaaaaagtgaacttgaacttgctgctcaaaaagcattagagcttttagattatgtaagtgacataaccactgtcgatggaaaaattttagctattatgggactgataactggtctgtctggacaagcaaaagtatctcatatcttatttgaacaggctaagatacacagtactgatatagcctctctctactactatagggcactagtccactttcataatgaaaaaattgaagaggcaaggatttgtatagacaaaagtctacaactcgaacccagaagacgaaaagcagttgtgataaaagaatgtgtagatatgtatgtgcctaacccgctcaaaaacaacattaaactctactataaagaaactgagagtgaaagccatcgagttataattgacaacattttgaaattaaagcagctgacgagaatttgtatgcgataaatttttattgacgcaattttattatttagatgtatgcaacttgttatttaaacaacagagataaaaatatctaagatattcaccttattgcaagatatttaaaatgctctagagttaaaagtatgatgtaaagaccattggcctggacaattaaaaaagggagctttatgactaatccaatcggtatcaataatttatctcaaagtagtaatatagcgaatgcaacgggtgatgaagtcgtaagtttagataaacacatcaacaccagtgctactgatacagatcaaatacaagcatttatagttagtacatggatggcgccttttcaaaatgatatgtatagtgaagataatcctatcagtccttactataaaattgagtggtaaacgattgaccaaataaatcataacgagatacttttataatagtatctcgttcctttcattcaatcctcacacatgaaaaaatatgcgctcaccaaaagttaaattcttaaccatcttcacgttttgtatatttattacaaaaatgtctttcgccagcaactcttgctctaatgaagcaggaacaatgttcagaatcgaaccaaatttaattaaagctatcgctcttgttgaaagcaatctaaaaaaggatagcataggcaagaacagagataagaataacaatataaagagtttagattattggttaatgcagataaaccagatgcatattcccctgttaaaaaaacgtggaataataaaagatgaacgagatttgttagataacccttgtctgaacattaaaataggaaccgagattttatataaccattttagtcgttgtggagtaacgtggcaatgcctggggacttataatgcgggttttgcaatggataaccaaaaaaagagacagcaatatgccccaaaatatatattgtatataccaggcttaatgaactaaacaatcgtaaggcttcagcaaaatgagcctaaagcctcttttttttatatagtgcaaacacccatacgtaaagctgttttgatcaactcgataccactgtgaacatctaatttcttcatgatattgagtctatgagtttcgactgttttcctgcttaactgcaagaaattagcgatttctttgtttgttttaccatcagctatgagttgtaatatttcactctcacgatttgtaagttgattatcagaggaatacctggaagatattttttcacaatccatatgtacactatcaaaataagtgtaaccattactaatgctatcaatagcacgatttagtttcgccgggtgactggttttccatacgcatcctttcgcacctgcttcaagcaattttatactatcaatatacggcatctttgctacaaatgtaataatatgagcatctatcttatggcttttaacccattttacgagttcggcccccatcattccacctgcaaattctcctaaaataaatatttaggctgtagatttgttacactccgctatagctttcttcagatctttatagcccacttatttaacaacttgaaaataaggtgttttacctgggttgttacaaaaggattgcattgcgtaaacgctttttatttacaacaaaatggggaagtattacggcgaagataaattggagcgggcgaagggaatcgaaccctcgtatagagcttgggaagctctcgttctaccattgaactacgcccgcttcgagatgcgtaaggcattataaaccttacgctctccttagcaagtgccacgctgctgactgctgattaattcgccatcagcattttggcttgctgccctgaggcggcaagtaacgtagcggatcaattgccgttgcacggtaacgaatctggaaatgcaggcgaacagatgccgcatccgtgctccccatagtggcgattttttgcccagccttcacgctttgcccattatttaccagcatcgtgtcattatgggcgtaagccgtaatgtaatcttcactgtgtttaatcatgatgagattaccgtagccacgcagctggttgcccacatacaccacctttcctgcacccgcggcgtaaataggtgtaccccgtggagcactgatatcaatccctttattgccgccatctgctgtgctatacggcatgataactttccctgtcgttggccataaccaacaacgttgccctactggcggccaggaacttttcggtaccgcactactcggtgtaacgcttgcggttttggtcgtacttttggcggtacttttacgtgtaatactgctacttttcgccccacccagttttagtttctgaccaacttcaatggtgtaagggggggaaatgccgttcagtcgcgccagttcttttacgctggttcccgtggtgcggctaatacgatatagcgtatccccccgtttcacggtgtaaacggagccggaatacgttcctgtatcggaacttttgctaccgctacagcccgccaaaagcagtccaacgcttaacaacatcacgatacccagagattttttattcaggcgtcccgcactcaaaatctttcctcgcttaaaaaacaagacgccttatcatagcagccagcctcttgatacccaatctcttgcttctggaaaaacgtggtaatagagaaagaggttaatttcatttggcaaagggaagtatcatcagcaaaatattcgctgtagaggtatcgaacttcctgactttttaccctatttcccatcctgatgcgtaataatcccaatttatcacattgattttatcgccactcatattgatacgtatcactgcccctattcagagtcctgtttcgtatcatatctgtgtttttttaacgtcatcacacttcctacctcccctaacgcttatcgtcgtttctggcgtaaatcttgcctgcttagactaaatctttgccataagaaccaaatgttcaaatcgaggggatttctatggaagcgcgggaagcaaccgctacgggtgaatcatgcatgcgcgtcgatgccattgctaaggtcaccgggcgggcacgatatactgacgattatgttatggcgggcatgtgttatgcgaaatatgtacgtagccctatcgcacatggttatgccgtaagtattaatgatgaacaagccagaagtttgccgggcgtactggcgatttttacctgggaagatgtgcctgatattccattcgctacagctgggcatgcctggacacttgacgaaaacaagcgcgataccgccgatcgcgcactgctaactcgccatgttcgtcatcatggtgacgccgttgccatcgtcgtggcccgcgatgaactcacggcagaaaaagcggcgcaattggtcagcattgagtggcaagaattacccgttatcaccacgccagaagcggcgctggcagaagacgctgcaccaatccataacggtggcaatttactgaaacaaagcacgatgagcacgggtaatgtccaacaaacaatcgatgccgccgactaccaggtacaggggcactatcagacccccgttattcaacattgtcacatggaaagcgtaacaagcctggcgtggatggaggatgacagccgaattaccatcgtttccagcacccagatcccgcacattgttcgccgcgtggttggtcaggcgctggatattccctggagttgcgtacgagtcatcaaaccatttgtcggtggcggttttggtaataaacaggatgtactggaagagccaatggcggcattcctgaccagcaagcttggcggcattccggtgaaagtttcccttagccgtgaagagtgtttcctcgcaacccgtacccgccacgcttttaccattgacgggcaaatgggcgtgaaccgcgacggaacattgaaaggttatagtctggatgttctgtctaacaccggcgcttatgcatctcacgggcactccatcgcttctgcgggggggaataaagtcgcttacctttatcctcgttgtgcctacgcttacagtagtaagacctgctataccaacctccccagcgctggtgcgatgcgtggttatggcgcgccacaagtcgtatttgccgttgagtctatgcttgatgacgccgcgacagcgttaggtattgatcctgttgaaattcgtttacgcaacgccgcccgcgaaggagatgctaatccgctcacgggcaaacgtatttacagcgcagggttgccggagtgtcttgaaaaaggccggaaaatctttgaatgggaaaaacgccgtgcagaatgccagaaccagcaaggcaatttgcgccgcggcgttggcgtcgcctgttttagctacacctctaacacctggcctgtcggcgtagaaatagcaggcgcgcgccttctgatgaatcaggatggaaccatcaacgtgcaaagcggcgcgacggaaatcggtcagggtgccgacaccgtcttcagccaaatggtggcagaaaccgtgggggttccggtcagcgacgttcgcgttattagtactcaagataccgacgttacgccgttcgatcccggcgcatttgccagtcgccagagctatgttgccgcgcctgcgctgcgcagtgcggcactattattaaaagagaaaatcatcgctcacgccgcagtcatgctacatcagagtgcgatgaatctgaccctgataaaaggccatatcgtgctggttgaacgaccggaagagccgttaatgagcttaaaagatttggcgatggacgctttctaccaccctgaacgcggcgggcagctctctgctgaaagctccatcaaaaccaccactaacccaccggcgtttggctgtacctttgttgatctgacggtcgatattgcgctgtgcaaagtcaccatcaaccgcatcctcaacgttcatgatagtgggcatattcttaatccactgctggcagaaggtcaggtacacggcggaatgggaatgggcattggctgggcgctatttgaagagatgatcatcgatgctaaaagcggcgtggtccgtaaccccaatctgctggattacaaaatgccgaccatgccggatctgccacaactggaaagcgcgttcgtcgaaatcaatgagccgcaatccgcatacggacataagagtctgggtgagccaccaataattcctgttgccgctgctattcgtaacgcggtgaagatggctaccggtgttgcaatcaatacactgccgctgacgccaaaacggttatatgaagagttccatctggcaggattgatttgaggataacatcatgtttgattttgcttcttaccatcgcgcagcaacccttgccgatgccatcaacctgctggctgacaacccgcaggccaaactgctcgccggtggcactgacgtactgattcagctccaccatcacaatgaccgttatcgccatattgttgatattcataatctggcggagctgcggggaattacgctggcggaagatggcagcctacgtatcggctctgcaacgacatttacccagctaatagaagatcctataactcaacgtcatctcccggcgttatgtgctgcggccacgtccattgctggaccgcagatccgtaacgtcgctacctacggtggaaatatttgcaacggtgccaccagcgcagattctgccacgccaacgctaatttatgacgcgaaactggagatccactccccgcgcggtgttcgtttcgtcccgattaatggctttcacaccgggccgggcaaagtgtctcttgagcatgacgaaatcctcgtcgcctttcattttccgccacagccgaaagaacacgcgggcagcgcgcattttaaatatgccatgcgcgacgcaatggatattagtacgattggctgcgccgcacattgccgactggataacggcaatttcagcgaattacgcctggcatttggtgttgccgcgccaacgccgattcgctgccaacatgccgaacagactgcacaaaatgcgccattaaacctgcaaacgctggaagctatcagcgaatctgtcctgcaagatgtcgccccgcgttctagttggcgggccagtaaagagtttcgtctgcatctcatccagacgatgaccaaaaaagtgattagcgaagccgtcgccgcggcggggggaaaattgcaatgaatcacagcgaaacaattaccatcgaatgcaccattaacgggatgccttttcagcttcacgccgcaccaggcacgccgctcagcgaattactccgcgaacaaggactgctaagtgtcaaacaagggtgctgcgtgggtgaatgtggtgcctgtacggtgttggtcgacggcacagcaatagacagttgcttataccttgccgcctgggctgaaggaaaagagatccgcacgctggaaggtgaagcgaaaggcggaaaactttctcatgttcagcaggcttatgcgaaatccggcgcagtgcagtgcgggttttgtacgcctggcctgattatggctaccacggcaatgctggcgaaaccacgcgagaagccattaaccattacggaaattcgtcgcggactggcgggaaatctttgtcgctgcacggggtatcagatgattgtaaatacagttctggattgcgagaaaacgaagtaaaaggatatccggcctgaattcaggccggattcactgaggttatgtgtttaacaactcatatttcttaatcttgcgatagagcgtagcaatgccgatgcccagttcatcagcaacttgcttcttgctgttatgacgactaagcgcctcgcggatcatttgcttttccatctcctccagcgccgtgccgcccgcatcatcgagactcaggtgcgcctcactgacctctgttacatcactttgctccgttgtgccattattcagcagatttggcggcaatagcgtgctgtcgataacttcaccactaggaaccacgttaaccagatattccatcaaattgcttaactcgcgcaggtttccgggccaacgatgcttacgcaatatttcgacgacatcgggagcaatgccaggataaacgcttcccagacgacgggtatgcagatgtaaaaagtaatgcaccaatagttcaatatcttcctgacgttcacgcagcggtggcagagttatcgggataacattaagtcggtagaagagatcttcgcggaatttaccttcggcaatgaactgggccaaattctgattagttgcagaaatgatgcgaatgtcgacttgtattgggctactggcaccaatcggcagaatttcacgtgcctcaatagcgcgcagtaatttagcctgcaacattaatggcatatcacctatttcatcgagaaacagcgtgcccgtattcgccgcctgaatcaaccctgttttaccgttggcagaagcgccagtaaatgcacctttaacataaccgaacagttcgctctccagaagctgctccggaatcgcggcacagttgatagcaataaagggtttattccgtcttccgctcaacttatggattgcacgggcgacgacttctttacccgtgccgctttcaccaaccaccataacgctggatgggctgggtgcaatacggctaatgagtcgttttaattgccgcataacacggcactcgccaaccaattgttcaatatgcggttcatcaggtgcatttgctacagaaaaactggtatggctttggtgaaacgccattaaaaataattgtcggccctgaatgttatgcaattgaccaatgattaattcacttttatcgtcccaactaacaatatgctgcatatgtccatgggtaaaattactctcaaatgttaatggtctgaaacggataggtttcccaataatattattttgcacaacaccaagtgtttttaaggcagtctgattaacaaactgaacccgattttcatcatctacaactaatacgccctgatccatattatcgatcatggtcgcaaatattttactgatgttatctcctggcccctgatcctccagaagtttgctaacaaaaatggtggatatatggcgaacataatcagaaaattcgcgtaaattatcactgatatgctcttgttgctcgtgggtaacggcaatcaaacttatcaccccaacacaacgatcctgtaaaatgacaggcgtacccagaaatgctttttcgcggcaattttctttactatcgcaaccttcgcaaaggggatcgaagcgagactgtgtcacaactttttcagttttcgtttccaggacgtggcggagcaggcgactgttgccgctcaactggcgaccaagaaacttcccatacgcgcccgttccggcaacgcgacacaagttttcatcaacgatctcaacctcaagctgcaaaaacgctggcaagcattctggcaaaacgctgaattgtcggttgaatttgcatcaatacactctgcgtagtagcaagctccatagctttaccttccagacttacttaaaagtcgatcattgaagacgttgatggttcacagatcatgatgatattaactcaggcgaaattggctttgataaaaacataagatttttatcattttctaatgaaattatggaagagatatcacatttctatatcaatatgagaattacggcggtgagtttatcaaactgaagagagatagcctgcccctttatcttatttctgatacttagcagcaaataaataacgcgataaaaaaagccaaacgttttcgtattttacaaacaaccagaagctggcatcaatttgtgatcaaccccacacattatccgtcaaattagtcttttgcagccgcgcggataattctggcacacttattgttagtcccaggtatagctgtgaaaacaccaatcactttggcaagtcacagtgaaataaaccactttgcctgtcattccactaccgggactttatgatgaaaactgttaatgagctgattaaggatatcaatagcctgacctctcaccttcacgagaaagattttttgttaacgtgggaacagacgccagatgaactgaaacaagtactggacgttgccgcagcattaaaagcactgcgtgctgaaaacatcagtaccaaagtctttaatagtggattaggtatttccgtattccgcgacaactccacccgtacccgcttctcttatgcttccgcgcttaacctgctcggccttgcacaacaagatctcgacgaaggcaaaagtcaaatcgctcacggcgaaaccgtgcgtgaaaccgccaatatgatctccttctgcgccgacgctattggtattcgcgacgatatgtatctgggcgcaggcaacgcctatatgcgtgaagttggcgctgcacttgatgacggttacaagcagggtgtactgccacagcgtccggctttagtgaacctgcaatgcgatattgaccacccgactcagagtatggctgacctcgcgtggttacgtgaacactttggtagtctggaaaacctgaaaggtaaaaaaatcgccatgacctgggcctactctccaagctatggcaaaccgctctctgtaccacaaggcatcatcggtctgatgactcgcttcggtatggatgtcaccctggcccatccggaaggctacgacctgatcccggatgtggttgaagtggcgaaaaacaatgctaaagcctccggtggtagcttccgtcaggtcaccagcatggaagaagccttcaaagacgcagacatcgtttatccgaagagttgggcaccttacaaagtgatggaagagcgtactgaattgctgcgtgcgaacgatcacgaaggcttaaaagcactggaaaaacagtgtctggcacagaacgcgcaacacaaagactggcattgtactgaagagatgatggaactgacccgtgatggcgaagccctgtacatgcactgcctgccagctgatatcagcggcgtatcctgtaaagaaggtgaagtgactgaaggcgtattcgaaaaataccgtatcgctacctacaaagaagccagctggaagccttatatcatcgccgcgatgatcctgtcccgtaaatacgccaaaccaggtgcactgctcgagcaactgctgaaagaagcgcaagaacgcgtgaaataacccctcgggccgatcagctggtcggccctctatttccagaggccaaaaggataggatatgtccgttttcagtttgaagattgatatcgccgataacaaatttttcaacggcgaaacaagtccgctctttagccaaagccaggccaaactggcgcgccagttccaccagaaaatagctggttatcgcccaacaccgctttgtgcgctggacgatctcgcaaacctttttggtgtgaagaaaattctcgtcaaagacgaaagtaaacgattcggtctgaacgccttcaaaatgcttggcggtgcgtacgccatcgctcaattattgtgtgaaaaatatcatcttgatatcgaaacgctgagttttgagcacctgaaaaatgccatcggcgaaaaaatgactttcgcgaccaccaccgacggcaaccacgggcgcggtgtggcgtgggcagcacagcaactcggacagaatgcggtgatttacatgccgaaaggttctgctcaggaacgcgttgacgccattctgaacctcggtgccgagtgcatcgtcacggatatgaactatgacgataccgttcgcctgaccatgcaacacgcgcagcagcacggctgggaagtggtacaggacacggcatgggaaggttacaccaaaatcccaacctggatcatgcaaggctacgcaaccctggcagatgaagccgtcgagcaaatgcgtgaaatgggcgtaaccccgacgcacgttctgctgcaagccggtgtcggagcaatggccggtggtgtgctgggttatctggtcgacgtctatagcccgcaaaatctgcacagcattattgttgaacctgacaaagctgactgtatttatcgctccggcgtcaaaggcgacatcgtcaacgttggcggtgatatggccaccatcatggcaggcctggcctgtggcgaacctaacccgctgggctgggaaatcctacgtaactgcgccacccaattcatctcctgccaggacagcgttgccgcattaggtatgcgcgtgctgggtaatccgtacggcaacgacccgcgcatcatctccggtgaatccggcgctgtcggtttgggcgttctcgcagcggttcattatcacccgcaacgtcaaagcctgatggaaaaactggcgctgaacaaagatgccgtggtgctggttatcagcactgaaggcgacaccgacgtgaagcactaccgcgaagttgtctgggaaggcaaacacgctgtagcaccttaatcaccctattggaactgctccctgcaaaacggggagtaaaaaatctggagaaaaataatggctaagaatattccattcaaactgattcttgaaaaagcaaaagattaccaggcggatatgactcgcttcctgcgcgacatggttgctattcccagtgaaagctgcgacgagaaacgcgtagtacatcgtattaaagaagagatggaaaaagtcggcttcgataaagttgaaatcgacccgatgggcaacgttctcggttatatcggccacggcccgcgtctggtggcaatggacgctcatatcgataccgtcggcattggcaacatcaaaaactgggacttcgatccgtacgaaggcatggaaactgatgaactgattggtggtcgcggtacttccgaccaggaaggtggcatggcctctatggtttatgccggtaaaatcattaaagacctcggtctggaagatgaatataccctgctggttaccggtacggtgcaggaagaagactgcgacggtctgtgctggcagtacattattgaacaatccggcattcgcccggaatttgtggtcagtaccgaaccaaccgactgccaggtataccgtggtcagcgcggtcgtatggaaattcgtattgatgttcagggtgttagctgccacggttctgcaccagaacgcggtgataacgccattttcaaaatgggtccgattcttggcgaattacaagaactctcccaacgtctgggttatgacgaattcctcggcaaaggcaccctcaccgtttctgaaatcttcttcacatccccaagccgttgcgctgtagcagacagctgcgcagttagtatcgaccgtcgtctgacccggggcgaaacctgggaaggcgcgctggacgaaatccgcgccctgcctgcagtacagaaagctaacgcggttgtttctatgtacaactacgaccgtccgtcctggactggcctggtttacccaaccgaatgctacttcccgacctggaaagtggaagaagatcacttcaccgttaaagcactggtgaatgcctacgaagggctgtttggcaaagcgccggttgttgataagtggaccttcagtactaacggcgtatctatcatgggccgtcacggcattccggtgatcggctttggcccgggtaaagaacctgaagcgcatgcacctaacgaaaaaacctggaaatctcacctggtgacctgtgccgcgatgtacgctgcaatcccgttaagctggctggcaacagagtaattactcttcacttattcccctccggttcgccggagggtttttggagtttgctatgcgcgtattgatcaaaaacggcactgtcgttaacgcagatggacaagccaaacaggatttgctgattgaaagcgggattgttcgccagttgggcaacaatattagcccgcagctcccgtatgaagaaattgatgccactggctgttacgttttccctggcggcgtggatgtccatacgcatttcaatattgatgtcggcatcgcgcgcagttgtgatgatttttttaccggtacccgcgcagctgcgtgtggcggtacaacaaccattattgaccatatgggatttggcccaaacggctgtcggttacgccatcaactggaggtttatcgtggttatgccgcccataaagcggtcatcgattacagctttcacggtgtgatccagcacattaatcacgcaatcctcgacgaaatcccgatgatagtcgaggaaggactgagcagttttaaactctatttaacctatcaatacaaactcaacgatgacgaggttttgcaggcattacgccgcttgcatgaatccggcgcgctgaccaccgtgcacccggaaaatgatgcggctatcgccagcaagcgggcggaatttatcgccgcagggttaaccgcgccgcgctatcatgccttgagtcgccctctggaatgcgaagcggaagccatcgcccgcatgattaacctggcacaaattgccggtaacgccccgctctatatcgtgcacctgtctaacggcttaggtctggattatctgcgtcttgcccgtgcgaatcaccagccagtctgggttgaaacctgcccacaatatctcctgttggacgaacgcagttacgatacagaagatggcatgaagttcattcttagcccaccgctgcgtaacgtacgcgagcaggacaaactgtggtgtggcatcagcgatggtgcgattgacgtggtggcaaccgatcactgcaccttcagcatggctcaacgcctgcaaatttctaaaggcgatttcagtcgctgcccaaatggcttacccggtgtggaaaaccgcatgcagttactgttttccagtggcgtgatgacgggacgtataacaccggaacgctttgttgaattaaccagcgcaatgcccgccaggttgtttggcctgtggccgcaaaaaggattattagcgcccggttccgacggcgacgtggtgattatcgacccacgtcagagccaacaaattcagcatcgccatctccacgacaacgccgactacagcccatgggagggttttacctgtcagggcgcgattgtcagaaccttatcccgtggtgaaacgattttctgtgacggcacctttacaggcaaagccgggcgaggtcgtttcctgcgacgcaaaccgtttgtccctcccgtgctctaaccactgccagggatctatacacaatcaagaatgatgagtgaggaaaaatgagtaagaaaattgttctcgccctgggcgggaatgcgctgggcgatgacctggccgggcaaatgaaagcggtaaaaattacttctcaggcaattgttgatttaattgcccagggacatgaagttatcgtcactcatggtaacgggccgcaggtgggcatgattaaccaggcctttgaagctgccgcaaaaactgaagcgcacagcccaatgctgccgatgtctgtctgtgttgcattaagccagggttatattggttacgatctacaaaacgctttaagagaagaactgctttctcggggcattaataaacctgtagcaacgctggttactcaggtcgaagtcgacgctaacgatccggcattcctcaacccgaccaagccgatcggtagcttctttaccgagcaagaagcagagcaactgacaaaacagggttacactctgaaagaagatgctggtcgcggctatcgccgtgttgttgccagcccaaaaccggttgatatcattgaaaaagaaacggttaaagctctggtagatgcaggtcaggtggtgatcaccgttggcggtggtggtatccctgttattcgtgaaggtaaccatctgcgtggtgccagcgcggttatcgataaagactgggccagcgcccgtttagcagaaatgattgatgccgatatgctgatcattctgactgcggtagaaaaagtggccattaacttcggtaaagagaatgaacagtggctcgatcgcctgagtttaagtgatgctgaacgctttatcgaagaaggtcattttgcgaaaggttctatgctgcctaaagtggaagctgccgccagctttgctcgctctcgcgcaggtcgtgaagcactgattaccgtattgagcaaagcgaaagaagggattgaaggcaaaacaggaacggtgatttgtcagtaatttaaaggccgggtgggtaataccatccggccaaagattgtcaagtaagtgcgctttgttgatgccggatgcggcgcgagcgccttatccgtcctacaaaacatcgcaaattcaatagattgcaatgcacttgtaggcctgataagcgtagcgcatcaggcaatttggcgtttgtcatcagtctcaggccgggtgggtaataccatccggccattttcatttaagccacttccagcacttcttttgtcgctttcacgccctgatgcatcaacatcattaacgcctcaagtacgccgccgccaatcgcccgggctttatcagaaacgctggtgaaatcagcggtttcaccacgaggatcgatatcaccaattttaaaaccaccaaccactgccaggccgtcgttcaacaagccacgcaccatccccgtcaacggtgctttaatttcatgctcaccaatccaggcaatcacatcgccctctttcaccagatcgcctaatttcacgttggatcgcataatgcctgcagcaggagcacggatcacccgtcgggtggtatgccccataatattgccaggaacaccggtattctcctgcgcacaaccagagtaaatcacctgaccgagccagtgcccgcgatttgtttcaattaccgcatgacaatccttcccagcagtaaagcccggcccaagcgcgattgttactggtgccatatctgcccgcgttcccaaattctgtttcgccagaatagcgtccaccacgcaaagcggtttcagttcatcaagcaaactacaggcgggatctaccatcacaggaatgaatccgcgttcggtaagtttcatcgcttccgcagagctggttgccaggcgagcagtgacgccttcgaccgtcatttcgccatcgaacacggcctgggcaaacgccacggtacaacgaatcactgtcggtttttccacttccagcatgatcactttaaaacccgcatgatacagacgtagcgccacaccactggcgatatctcccgcaccgcgaatcaccaccagctggtgtccggaaggatgagaaggtttcatcatcagcccacccggcgcgttatttttcacctgtaatatttctgccagcacgctgatggcgatctcctgcggcgtttccgcacctatgttgtaaccaacgggcgcatgtaaacgggcaatatgttcttcagccacgcctttctcacgcaattgacgcaggaaaagctgaaccttgcgacgacttgccagcaaccccaaccatgcaatgggctgttcaatgagtttgtcgagggcttcacgatcctgattattcgtggcaatcaggacaaaattatcagggcgaatatccagtgcttccactgccgcaccaaagctctcagcatggagaagcgtggtacttggtgggaatagttcaggattgaggctttcgcgataaatatcagcaacggcaatatcaaatcctaatagcgccgcactctgggctatcgcccggttgacatgccccgcgccaatcaacaccagacgtggacgcataccatggacgctgataaatacactcattgcacctccacaatcactcccgacagcatccgcaccgttacgagccatacgtccatggaataatcgcggcttacgttcctgcaatgcctgaaggctctcttcaatcaccttccgctcaaccattccgccaccaattgtaccgacgatagaaccatcggcgcgcactaacatttgtgcagaatggcggggagtgctgcctcggctatcaacaatttgcgccatagcaaacggacaattttgctcttcgagttttgcagcctctgtgaaaatattcataccaacctcaatggatatcctttcagtaacccggaatacccgggccgttaattcacaaatctgcgcgcgattgcaggatgttcttgtatatcgcccagccagattgcctctacgtcgtgttgttgcagcggttgaaggagctcgctttgtgcaatcgcattctcacattgagaaaaacggttaatgaaccagactcgccgacaaccttgcggtacgtttttaaacgccccctgagggtggcgaaccagcgcaacgagatcgctcagttgcaaggttgcatcaggtgttaacccggtaatatcagcaaactggctccagcgatggacattttctgtgctcactttcgcgcccaaagtatgtcctcccatcacagcaatcacgcagcaactgcttttgggtatgcaaggttcgtgctcatcaggcgcttttaacggcattccacggctgccatctgcttcaatgagaattacgtcacactctggtcgttgcaccagtgcatcaatcgcttctggcgtaaatccctgcacttttccctggttcgctttccagctgtgaaaacaaaaactaatgggggatgtaagagacgcatgaggaagcatggcgggatcacgacagaaaaccacgggccagtgagacgttggcataaacatatgtgtcgtcgtcgtgattaacacacgcctgccgctagcctggagcagttctgccagccaaaaaagcaagctggttttccccccagcaccaacaacagaaatcacagtgggacgtttctgcgcacctaaatcaatgactaatgcgcttgggtcaactatacttttcacgagtctttatgacctctctgggataaattatccccaacttaatccatcaggaagtaacgcaattatcaggcgttattagcccctataaataatggaaccactatgagtgccatcgactgtataattaccgctgccggattaagtagtagaatggggcaatggaaaatgatgttaccctgggaacagggaacaattcttgatacaagtatcaaaaatgcgttgcagttttgtagccgaattattttagtcaccggctatcgtggtaatgaactgcacgaacgttatgcgaaccagagcaatatcactattattcacaacccagattatgcgcagggtttactaacatccgtcaaggccgcagtacccgcagtgcaaacagaacattgttttctcacccacggtgacatgccaaccctcaccatcgatatttttagaaaaatctggagcttacgaaatgatggcgcaatactgccactccataatggcatccccggccatccgattttagtgagtaaaccatgcctgatgcaggcaatccaacgacccaatgtcaccaatatgcgtcaggcactccttatgggagatcattattccgtcgaaatagaaaatgcagaaataattttagatattgatactccggacgactttattacagcgaaggaaaggtatactgaaatttaaaaaacgtagttaaacgattgcgttcaaatatttaatccttccggcactcattatcataatgataaggaatcactgattttgagaaaagagaaaaattgataaatgggctggcaataataattttcaggagtgattttaattctcatttagcacctgtgagttcattcacaaaaagcccttaagtttcgagccgcctcacatttttttatatttcccgccaaacctggcaagagtggtgcgattgttgctctatccccctaaaccaccggatttctcaacaccggtcactcaatgatatctgtataagctaaggagagggttatgggggatattatgcgtcccattccgtttgaggaacttttgacgcgcatatttgatgaataccaacaacaacgcagtatctttggtattcccgagcaacagttttacagtcctgtaaaaggtaaaactgttagcgtcttcggtgaaacctgtgccactcccgtcggccctgccgctggcccgcacacgcagctcgcgcaaaatattgtcacttcctggctgactggcggacgcttcatcgaactaaaaaccgtccaaattcttgaccgcctggagctggaaaagccctgtatcgatgccgaagacgagtgctttaacaccgaatggtctaccgagtttaccctgcttaaagcctgggatgaatacctcaaagcctggtttgccctgcaccttctcgaagcgatgttccagccttctgattccggtaaaagcttcatctttaatatgagcgtcggttacaacctcgaaggtattaagcaaccgccgatgcaacagttcatcgacaatatgatggacgcatctgaccatccgaaattcgctcaatatcgcgatacgctgaataaattactccaggatgacgcatttttagctcgccacggattgcaggaaaaacgcgaaagcttgcaagccttacccgctcgcatccccaccagtatggtgcatggcgtcaccctctccaccatgcacggctgtcctccgcatgaaatcgaagccatttgccgctacatgctggaagaaaaagggctcaacacctttgtgaaacttaacccgaccttactggggtacgcgcgtgttcgtgagatcctcgatgtctgcggtttcggttacataggcttaaaagaagagagttttgatcacgacctcaagctgacgcaagcactggaaatgctggaacgcctgatggcactggcaaaagaaaaaagtctcggctttggcgtaaaactgactaacactctcggcaccatcaacaataaaggcgcactgcctggtgaagagatgtatatgagtggccgtgcgctgttcccgctctccatcaatgttgcagcagttctctctcgcgcctttgacggcaaactgcccatttcttattccggtggtgccagtcagctgactatccgcgatatttttgatacaggtattcgccctattactatggcaaccgacctgctgaaacctggcggctatctgcgcttaagtgcctgcatgcgcgagctggaaggctccgacgcctggggacttgaccatgttgacgtcgaacgactgaacagactggcagcagatgcgttaaccatggaatacacccagaaacactggaagccagaagagcgtattgaagtggcagaagacctgccgctgaccgactgctacgttgccccctgtgttactgcctgcgctatcaagcaagatattccggaatacatccgtctgcttggcgaacaccgctatgccgacgcgctggaactcatctaccaacgcaacgctctgcccgccattaccggtcatatttgcgatcaccagtgccaatacaactgtacccgcctggattacgacagtgcgctgaatatccgcgaactgaaaaaagtcgcgctggaaaaaggttgggatgaatataagcaacgctggcacaaaccagccggttctggtagtcgccatccggttgccgtgattggtgcaggtccggcgggtctggcagcaggttacttccttgccagagcgggccatccggttacgctgtttgaacgcgaagccaatgcgggcggcgtggtgaaaaatatcattcctcagttccgtattcctgcagagttaattcagcacgatatcgattttgttgccgctcacggcgtgaaatttgagtatggctgcagtcccgatttaaccattgagcagttaaaaaatcagggcttccactatgttctgattgccaccggcactgataaaaatagcggtgtgaaactggcgggcgacaaccaaaatgtctggaaaagtctccccttcctgcgtgaatacaacaagggtacagcgctcaagctgggcaaacatgtggtcgttgtcggggcgggtaacaccgcaatggactgcgctcgtgcggcgttacgcgttccaggcgtagaaaaagcaacgatcgtttaccgtcgtagtctacaagagatgcccgcatggcgcgaagagtatgaagaagcgttgcacgacggcgtagagttccgtttcctgaataatccggaacgtttcgatgctgatggcaccttaaccttgcgcgttatgagccttggcgaaccggatgagaaaggtcgtcgtcgtccggttgaaaccaatgaaacagtaacactgcttgtagacagcctgatcaccgccattggtgaacagcaggatactgaagccctgaatgcgatgggcgtgccgctggacaaaaacggctggccagacgtcgaccataatggcgaaactcgtctgactgacgtctttatgatcggcgacgtacagcgcggaccatcctccattgtcgctgctgtcggaaccgcgcgtcgggcgaccgatgccatccttagtcgggaaaatatccgttcccaccagaacgataaatactggaacaacgtcaatccagcggaaatctatcaacgtaaaggcgatatctctatcacgctggtgaacagtgacgatcgtgacgcgtttgtcgcccaggaagccgctcgctgcctcgaatgtaactacgtttgcagcaagtgtgtggatgtctgcccgaaccgcgccaacgtctccattgcggtcccaggcttccagaaccgtttccagacgctgcacctcgacgcttactgtaacgaatgcggcaactgcgctcagttctgtccgtggaacggtaaaccgtacaaagacaaaatcaccgtcttcagcctggcgcaagactttgataacagcagcaacccaggcttccttgtggaagattgccgggtacgagtacgtctgaataaccaaagctgggtgttaaacatcgacagcaaaggtcagtttaacaacgtaccaccggagctgaacgatatgtgccgcatcatcagccatgtccaccagcatcatcattatctgctgggccgcgtggaggtgtaatcatgttgattctgaagaatgtcactgcggtacagctacacccggcaaaagtgcaggaaggcgttgatatcgccatcgaaaacgatgtgattgtcgctatcggcgatgccctgacgcaacgctaccccgacgccagcttcaaagagatgcatggccggattgtgatgccagggattgtctgcagccacaaccatttttacagcgggctttcccgcggaattatggcaaacatcgcccctttgcccggatttcatcagtacgctgaaaaatctctggtggcggctcgatcgcgcccttgatgaagagagcctctattacagcggactgatttgttccctggaagcgattaagagcggatgtacaagcgttatcgatcaccatgcctctccggcgtatatcggcgggagactctccacattgcgcgacgcatttttaaaagttggcctgcgcgcgatgacctgttttgaaactactgaccgtaacaacggcatcaaagagttgcaggaaggtgtagaagaaaacatccgtttcgcccgtttgattgatgaggcgaagaaagcgacaagcgagccgtatctggtggaagcacatatcggtgctcacgcgccgtttaccgtgccggatgccggtctggagatgctgcgtgaagccgtgaaagccacaggccgtggtttgcatattcacgctgcggaagacctttacgacgtttcctacagtcaccactggtacggcaaagacctgctggcacgactggcgcaattcgatctcatcgacagcaaaacgctggtcgctcatgggctgtacttgagcaaagatgacatcaccctactcaatcagcgcgatgcgttcctggtgcataacgcccgtagtaacatgaacaaccatgtcggctacaaccatcaccttagcgacatccgcaatctggcgttgggaacggacggcattggtagcgacatgtttgaagagatgaaatttgccttctttaaacatcgcgatgcgggtggtccgctgtggcctgacagttttgccaaagccctgactaacggtaacgaactgatgagccgcaactttggcgcgaaatttgggcttctggaagccggttacaaagctgatttaaccatttgcgattacaacagcccgacgccgctgctggcagacaatatcgccgggcatatcgctttcggtatgggcagtggcagcgttcacagcgtgatggtcaatggtgtgatggtctatgaagaccgtcagtttaacttcgattgcgattccatttatgcacaagccagaaaagccgctgccagtatgtggcgtcggatggatgcgctggcataaatgacagatgccctcttcccgcagggaagagggttaaataaggaaagaagatgattgaacaatttttcaggcccgactctgtcgaacaggcgctggaactgaagcgccgctaccaggatgaagccgtctggttcgccgggggcagcaaactcaatgctacaccaacccgtaccgataaaaagattgccatttccttacaggatctggaactggactgggttgactgggataacggtgcactgcggattggcgcaatgtctcgcttgcagccactgcgtgatgcgcgatttattcctgcagcgctgcgtgaagccctcggttttgtttacagtcgccatgttcgtaatcagagcaccattggtggtgaaatcgccgcccgccaggaagagagcgtgctgcttcccgtcctgttggcactggatgctgaactggtttttggcaacggcgaaacgctgagtatcgaggactacctggcctgcccatgcgatcgcctgctaaccgaaattatcattaaagatccgtatcgcacctgtgcgacccgcaaaattagccgttctcaggcaggtttaaccgtcgtgacggcagccgttgcaatgacagaccacgacggtatgcgaattgcgctggatggcgtcgccagtaaagcactgcgtctgcatgatgtcgaaaaacaaaatctggaaggcaatgcacttgaacaggctgtcgccaacgccattttcccgcaggaagatttgcggggcagcgtggcctataaacgctatatcacgggagttctggtagccgacctgtatgccgactgccaacaggctggggaggaagccgtatgatcatccactttactttaaatggcgcgcctcaggagctaaccgttaatccaggcgaaaacgtgcaaaagctgttgtttaacatgggaatgcactctgtacgcaacagtgatgatggtttcgggtttgccggttctgacgcaataatctttaacggtaatatcgttaacgcgtccttgcttattgccgcacagttagagaaggcagatattcgtaccgcagaatctctgggcaaatggaacgagttaagtctggttcaacaggcaatggttgatgttggcgtggtgcagtctggttataacgatccagctgcagctctgattatcaccgatcttctcgatcgcatcgccgcacctacccgcgaagagatcgacgacgcgctttctggtttgttcagccgcgatgctggctggcagcaatactatcaggtcattgaactggcggttgcacgtaaaaataatccgcaggccaccattgatatcgctccgactttccgtgacgacctagaagtcattggtaagcattatcctaaaactgatgccgcgaaaatggtgcaggcgaaaccctgctatgttgaagaccgcgtaacggctgacgcctgcgtcattaaaatgttacgtagcccacacgctcacgcactgattactcatctggatgtcagcaaagctgaagccttaccgggcgtcgttcacgttattactcacctgaattgcccggatatctactataccccgggtggtcagagcgcaccggaaccgagtccgcttgaccgccgtatgttcggcaagaaaatgcgtcacgtcggcgatcgtgttgctgcggtcgtcgcagaaagtgaagaaattgcgctcgaagcactgaagctcatcgacgttgaatatgaagtgcttaagccggtaatgagcatcgacgaagcaatggcggaagatgcgcctgtcgtgcacgatgaaccggtggtgtatgttgctggtgcgccagatactctggaagacgataacagccatgcagcccagcgcggcgagcatatgatcatcaacttcccgatcggttctcgccctcgcaaaaatatcgccgccagtattcatggtcatattggcgatatggacaaaggctttgccgatgccgatgtgatcattgagcgaacctataacagtacgcaagcgcagcagtgcccgactgaaacacatatctgctttactcgtatggacggcgatcgtctggttatccacgcctccacccaggtaccatggcacttacgccgccaggtcgcgcgcctcgtgggcatgaaacagcataaagttcatgtcattaaagagcgagttggcggcggttttggttccaaacaggacatcctgctggaagaagtgtgcgcctgggcaacctgcgtgaccgggcgtccggtactgttccgctacacccgtgaagaagagtttattgctaacacctctcgtcacgtcgcgaaagtcaccgtcaaactgggagcgaaaaaagatggtcgcctgacggcagtgaagatggatttccgcgccaacactggcccttacggcaaccacagtctcaccgtaccgtgtaacggaccggcgctgagcctgccgttatatccgtgcgataacgtcgatttccaggtcaccacctactacagcaacatttgcccaaatggtgcttatcagggttatggcgcaccgaaaggtaacttcgctatcaccatggcattagcggaactggctgaacagttacagatcgaccaactggaaattatcgaacgtaaccgggtacacgaagggcaagagctgaaaattctcggtgcaatcggtgaaggtaaagcgccgacctccgttccttccgccgccagctgtgcactggaagagatcctgcgtcagggtcgcgagatgatccaatggagcagtccgaaaccgcaaaatggtgactggcacatcggtcgcggcgtcgccattatcatgcagaaaagcggtatcccggatatcgatcaggctaactgcatgatcaaactggaaagcgacggcacctttatcgttcattctggcggtgcggatattggtactggtctggatactgtagtgacgaaactggcagcagaagtgctgcactgcccaccgcaggacgtgcatgttatctccggtgataccgatcatgcgttgtttgataaaggcgcatatgccagctccggtacttgcttcagcggtaacgcggcgcgtttggcagcggaaaatctacgggagaaaattctgttccacggcgcgcaaatgttgggtgagccagtggcagatgttcaactggcaacgccgggcgtcgtgcgcggcaagaaaggcgaagttagtttcggggatattgcccataaaggcgaaaccggcaccggctttggtagtctggtgggaactggcagttatatcacgcctgatttcgccttcccgtatggcgcaaacttcgctgaagttgccgtcaacacgcgtacgggtgaaatccgcctggataaattctacgccttgctggactgcggtacaccggtcaatccagagttagcgttgggacaaatctacggtgccaccctgcgtgctatcggccacagtatgagcgaagagatcatttatgacgccgaaggtcacccgttaacgcgtgatttacgcagttacggcgcaccgaaaattggtgacattccgcgtgatttccgcgctgtgctggtgccgagcgacgataaagtcggcccgttcggggcgaaaagcatcagcgaaatcggtgtaaatggcgcagctccggcgattgctaccgcaattcacgatgcatgcggcatctggttacgcgaatggcatttcacaccggagaaaatactcactgcgctggaaaaaatataaataataaatggccgcttcggcggcctgtttctctgtttgaacgatgactaaatagtgactgcgaaaatgagataagccgttctcaaggcgtcctgcgccccaaattcgtgggaatttattttactaattcagatgatcaaatttactttaaaaggagtgaagggatgtctgatataaaccatgcaggttctgaccttatatttgaactggaggatcgccctccctttcatcaggctctcgttggtgccattacccatctgttggcaattttcgttccgatggtaacccccgcgttaatcgtgggtgcggccttacagctttccgctgaaacaactgcctatcttgtttctatggcgatgatcgcctctggtattggtacctggttacaagtaaaccgctacggcatcgtcggttctggcctactcagtattcagagtgtcaattttagttttgttacggtcatgattgcgctgggcagcagcatgaaaagcgacggttttcacgaagagttaatcatgagcagccttctcggcgtctccttcgttggcgcatttctggttgtcggatctagttttatcttgccctatttacgtcgggttattacgcctaccgtcagcggtattgtggtactgatgatcggcttaagcctgattaaagtcggcattatcgattttggtggaggatttgcagccaaaagcagcggtacgttcggcaattacgaacatctcggcgttggtttattggttttaattgtggtgatcggctttaactgctgtcgcagtccgttgctacgcatgggagggatcgccattgggctatgtgtcggctatatcgcaagcttatgcctgggcatggtggatttcagcagtatgcgcaatttgccgttaatcaccatcccgcatccgttcaaatacggctttagttttagcttccatcagttcctggtggttggcacgatttatctgcttagcgtgctggaagcagtcggcgatatcaccgccacggcaatggtttcccgccgccccattcagggggaagagtatcagtcccggctgaaaggcggcgtgctggcagatggtctggtttctgttatcgcctccgctgtcggtagtttaccattaaccacgtttgcgcaaaataatggggttattcagatgactggcgtcgctagtcgttatgtcgggcgaaccatcgcggtaatgctggttatcctcggcttatttccgatgattggcggcttcttcacgaccattcccagcgcagttctgggaggcgcaatgacgttgatgttttccatgattgccatcgcagggattcgcatcatcatcaccaacggtttaaagcgccgtgaaacacttattgtcgccacttctttaggtttagggcttggcgtctcctacgatcccgaaatttttaaaatattgccagcctctatttatgtattagttgaaaaccctatttgtgctggcgggttaactgcgattttattaaatattatcctccctggtggctaccgacaggaaaacgttctgcctggtattaccagtgcggaagagatggattaacagtaaaggagtcaatgatgagtggagaacacacgttaaaagcggtacgaggcagttttattgatgtcacccgtacgatcgataacccggaagagattgcctctgcgctgcggtttattgaggatggtttattactcattaaacagggaaaagtggaatggtttggcgaatgggaaaacggaaagcatcaaattcctgacaccattcgcgtgcgcgactatcgcggcaaactgatagtaccgggctttgtcgatacacatatccattatccgcaaagtgaaatggtgggggcctatggtgagcaattgctggagtggttgaataaacacaccttccctactgaacgtcgttatgaggatttagagtacgcccgcgaaatgagcgcgttcttcatcaagcagcttttacgtaacggaaccaccacggcgctggtgtttggcactgttcatccgcaatctgttgatgcgctgtttgaagccgccagtcatatcaatatgcgtatgattgccggtaaggtgatgatggaccgcaacgcaccggattatctgctcgacactgccgaaagcagctatcaccaaagcaaagaactgatcgaacgctggcacaaaaatggtcgtctgctatatgcgattacgccacgcttcgccccgaccagttctcctgaacagatggcgatggcgcaacgcctgaaagaagaatatccggatacgtgggtacatacccatctctgtgaaaacaaagatgaaattgcctgggtgaaaagcctttatcctgaccatgatggttatctggatgtttaccatcagtacggcctgaccggtaaaaactgtgtctttgctcactgcgtccatctcgaagaaaaagagtgggatcgtctcagcgaaaccaaatccagcattgctttctgtccgacctccaacctttacctcggcagcggcttattcaacttgaaaaaagcatggcagaagaaagttaaagtgggcatgggaacggatatcggtgccggaaccactttcaacatgctgcaaacgctgaacgaagcctacaaagtattgcaattacaaggctatcgcctcagcgcatatgaagcgttttacctggccacgctcggcggagcgaaatctctgggccttgacgatttgattggcaactttttacctggcaaagaggctgatttcgtggtgatggaacccaccgccactccgctacagcagctgcgctatgacaactctgtttctttagtcgacaaattgttcgtgatgatgacgttgggcgatgaccgtagcatctaccgcacctacgttgatggtcgtctggtgtacgaacgcaactaataataaaactttaacatcctcgtgaggacatcattatgtctggagacatcctacaaacaccggacgcaccaaagccacagggcgcgctggataattattttaaaattaccgctcgtggcagtaccgttcgtcaggaagtactggctggcttaacgacctttctggccatggtttattccgttatcgtcgttccgggaatgctgggcaaagcaggttttcctcccgcagctgtgtttgttgccacctgtctggtcgcgggcttcggcagcttgctgatgggattatgggctaatttgccaatggcgattggttgcgcgatttccttgacggcgtttaccgcattcagtctggtactcgggcaacaaattagcgttcctgtcgcactgggcgcggtatttctgatgggcgtcatcttcaccgccatttccgtaaccggtgtgcgtacctggatcttacgtaatttgccgatgggtatcgctcacggtacaggtatcggtatcgggctgtttctgctgctgattgctgctaacggtgtgggtatggttatcaaaaacccgattgaaggcttgccagtggcgctcggtgcgtttacctccttcccggtgatgatgagcttgctggggctggcggtcatcttcggcctggagaagtgtcgcgtacccggcgggatcttgttggtgattattgcaattagcatcatcggcttaatctttgacccagcggtgaaataccacggtctggtggcgatgccaagcctgactggcgaagatggtaagtctctgattttcagcctcgatattatgggtgcactccagccaactgtacttccgagtgtactggcattggtgatgaccgcagtgttcgacgctactggcaccatccgtgccgtcgccggtcaggcgaatttgttggataaagacaaccagatcatcaacggcggcaaagccctgaccagtgacagtgtaagtagtatattctccggcctggtgggcgcagcgcccgcagcggtttatatcgaaagtgcggcaggaaccgccgccgggggtaaaacaggtttaaccgcaaccgtagtgggggcgttattcctgttaattctgtttttaagtccgctgagttttttgatccctggttacgccactgcacccgctctgatgtacgtaggtttgctgatgttaagtaacgtcagcaagctggatttcaatgattttattgacgctatggctggcctggtgtgtgccgtgttcatcgttctgacttgtaatatcgttaccggtattatgctgggctttgtgacactggtcgtaggccgcgtctttgcacgcgaatggcaaaagctgaatattggtacggtgatcattactgccgcactggtcgcattttacgcgggtggttgggcaatctaatagattctccgcgcctttcagcgcggagatttctttcagagaggattctcaccgctggcaacaatacgctgctggcggactcgcctgagttctctttcagtaagcaactgcagcgcctgtgttgggcaagattcaacgcaggctggcccctcttcccgctgttcacagagatcgcatttcacaatttgttgtcgggtatcccccggcaagctctgaatggtgatcattccaaacgggcacgcactgacgcaactctgacagccaatacaacgggcagaattggtctgcaccacctgctcgcccatcgtcagcgcccccacggggcaagcgccaacacaaggggcgttttcacactgatggcacatcaccggcgcactgatgctgtccagtcgctgtaccttcagccggggtaaaaagacatcggcattcaactcctgttcactagggtgagcgaccacacaggctacttcacaagtacggcagccaatacagtcagccggattaacgataattaagcttttcatcagcttgccttcgtatcaaacagagttaacatatcgcgcgccgcctgccttcctgcggccattgcagtgacaaccagatccgcgccatgaactgcatcaccaccagcaaagacttttttcagatgcgtctgggtaggtaaatacccgacgtcaccggtttgaatcaggccccatttatcgagtttaattccgctgccctgcaaccacggcatggcatgcgcctggaaaccaaaggccataatcagaacatcggcgggcaattcaaactcactacccgctaccggacgaggacgacggcgaccatccggccccggctcacccatggcggtacgaatcaggcccaccgcagttaaacgcccatcttcgtcacaagcgatatattgcggttgaacattgaactgaaactcgacaccttcctcgcgcgcattaaccacctctttgcggctgcccggcatactgacttcatcacgacgatacgcgcaggtcacgctggcggcattgaggcggatggaagtccgcaaacaatccattgtcgtatcgccaccgcccaataccacgactcgcttaccttccacgtccgtcagcggatactcttcagactccggcaatcccatgagctggcgggtatgggcagtcaggaacggtagagcctgaatgacaccgggcgcatcttcatgcggcagatctgctcgcatcatcccgtaagtccccacgccgatgaaaactgcatcatattcagaagttaaatcgctaaaggtaatatcgcggccaatttcacagttaagatgaaagtcgattcccattgcggtgaatatctctcgccgctggcttaataccgttttatcgagtttgaaaggaggaatgccaaaagtcagcataccgccaatttctggatggcgatcaaagacatcgacctgaactcctgcgcgcgccagaatatcagcacaccctaaccctgcaggcccagcgccaatcaccgccactttttcgctacggggaacaactttgctgacatcgggacgccaacccatcgccagcgcggtatcggtgatgtagcgttccagattaccgatagagactgcgccgctgtgatctttcaaagtacatgcgccttcacaaagacggtcctgtggacataccctgccgcaaatttctggtaaggaactggtctggtggcaaagttctgccgcttcaataatctttccttcctgtaccagacggatgtaatccggaatagcgttatgcagcgggcaatgccagttgcagttagctttttcggcacaataaacacagcggtcactctcataagtcgcttgttgtggatccagcccgcaatatatttcgccaaagtgggttttccgttcactcgcactaattttatctgcgcctttacggctgttaacggggagcaacgctgcactgcgagatggctgagcgtcactactcgcttttcctgctgccgttttgcgctggcgggccacctttatctgctgcaaccctttatcgtccatcagtcgtaacgcctgtgttgggcaaacttcaatacaggcttgcgtgccggaactgcgctggttacaaaggtcgcatttctgcgcaatcgtatcgaccatctcaacgacgccaaaggggcaagcgattgcgcatcttttacaaccaatacatttttgctcgtccagttgtacgctatcggactggaaagtcagagcattaaccggacaagccgtaacgcaaggggcattgttgcagtgatggcaggccaccggattcgcagcctggcctttccctacaacgtggatacgcggtcgaaagtcactgtgactcagcggccagttttcttgattgtgtgccaccgcacaggcaatttcacaagcatgacagcctatacattccgcagcttcagcagcaataaacttattcatttgcatccctttcatttaatgagttatgtcttctcaaatttcgcgatgcaataaacgggcatatattaggtagcatgaccgttttaattataattttgcgactgagttcaaattattgcccctcaatctatgccgctttcattatttcaacattgccgatcaaaagagcgctatccagataaaaacgattaaatgcgagagtgcgacatgccagaatgattaatgaaatatcaatatgagaaaattacagataattccattgtcaggttctcttctcattttcgtggtttaaccacgattatgtgattgcctccgcaattcctgtctctaactccccttcctcgcaaaaactggcactccacgagcatgtgtttagacagtttcattaacgtaaacggttgctttttactctggcgggcgaaaggagaaacactgatgagcgccatagattcccaacttcccagttcttctgggcaagaccgcccaactgatgaggttgaccgcatattaagtccaggaaagctgatcatactcggtctgcaacacgtccttgtcatgtacgcaggtgcagtcgctgttcctcttatgattggtgaccgactgggcctcagtaaagaagctattgcgatgctcattagcagcgatctcttttgctgcgggatcgtcacattattgcaatgtatcggtatcggccgctttatggggatccgcctgccggtgattatgagcgtgacctttgctgctgtaacaccaatgatagccattgggatgaacccggatatcggcctgctggggatatttggtgccactatcgccgcgggttttatcaccacattattagcgccacttatcggtcgcttgatgcctttattcccgccactggttaccggtgtggttattacttctatcgggcttagcatcattcaggtgggtattgactgggccgccggaggtaaagggaatccgcaatatggtaatcccgtttatttaggtatctcctttgccgtcttaatttttatcttgctcattactcgctatgcgaaaggatttatgtccaacgtcgccgtattactggggattgtatttggctttttacttagctggatgatgaatgaagtcaatttatccgggctacatgatgctagttggtttgcgattgttacgccgatgagctttggtatgccgattttcgatcccgtttccattctgaccatgactgccgtgttaatcatcgtgtttatcgagagtatggggatgttcctggcactgggtgaaatagtcggtcgtaaactctctagccacgatattattcgcgggctgcgtgtcgatggcgtagggacaatgataggcggcacgtttaacagcttcccccacacgagtttttctcaaaacgttggcctggttagcgtgacgcgcgttcatagccgctgggtgtgtatttctagcggaattatattaatcctgtttggcatggtgccaaaaatggcggtgctggtagcctccattccgcaatttgtgctgggcggcgctggtctagtgatgttcggcatggtactggcgacagggattcgaattctgagccgctgtaactacaccaccaaccgttacaacctctatattgtggcgatcagtctcggcgttggcatgactccgacgctctctcacgatttcttttctaagttaccggccgtactgcaaccgctgctacatagcggcattatgctcgcaacccttagcgccgttgtgctgaacgtcttctttaatggctatcagcatcatgctgacctggtgaaggaatccgtctctgataaagatttaaaagtcaggacagtacgtatgtggcttctgatgcgcaagctgaagaaaaatgagcatggagaataatatgaattttttaatgcgcgctatattcagtctgttgttgctttttactctctctattcctgtcatttctgactgtgttgcaatggccattgaaagtcgcttcaaatatatgatgctacttttttaaatggtttttacctgtcggcatccgctcaaaacgggcggttgtcgataaacgctcacttggttaatcatttcactcttcaattatctataatgatgagtgatcagaattacatgtgagaaattatgcaaacggaacacgtcattttattgaatgcacagggagttcccacgggtacgctggaaaagtatgccgcacacacggcagacacccgcttacatctcgcgttctccagttggctgtttaatgccaaaggacaattattagttacccgccgcgcactgagcaaaaaagcatggcctggcgtgtggactaacagcgtttgtgggcacccacaactgggagaaagcaacgaagacgcagtgatccgccgttgccgttatgagcttggcgtggaaattacgcctcctgaatctatctatcctgactttcgctaccgcgccaccgatccgagtggcattgtggaaaatgaagtgtgtccggtatttgccgcacgcaccactagtgcgttacagatcaatgatgatgaagtgatggattatcaatggtgtgatttagcagatgtattacacggtattgatgccacgccgtgggcgttcagtccgtggatggtgatgcaggcgacaaatcgcgaagccagaaaacgattatctgcatttacccagcttaaataaaaaaaccccgacatttgccggggttgtgagcataacgtaatgcttattttaccggacgcatcgccgggaacagaataacgtcgcggatggtatggctgttggtgaacagcattaccatacggtcgataccaattcccagacctgctgtcggcggtaagccatgttccagtgcggtgacgtaatcttcatcgtagaacatcgcttcgtcgtcacctgcgtctttcgcggcaacctgatccaggaagcgttgcgcctgatcttccgcgtcattcagctcgctaaagccgttaccgatttcacgaccaccaatgaagaactcaaagcggtctgtgatttccgggttaacgtcgttacgacgcgccagcggagaaacttctgccggatattcagtaatgaaggtcggctgaatcagatgtgcttctgccacttcttcgaagatctcggtaacgatacggcccagaccccagctcttctcaacgtggatgccgatagattcagcaattgctttcgcagagtcgaagttgtccagatccgccatgtcggtttccgggcgatatttcttgatcgcttcacgcatggtcagtttttcgaacggtttaccgaagtccagcgtcacgtcgccgtaggtcacttccgtcttaccgagaatatcctgtgccagagtacggaacaggctttcggtcagctcgatcagatctttgtaatctgcgtaagccatgtagagttccatcatggtgaactctgggttatgacgtacggaaataccttcgttacggaagttacggttgatttcgaatacacgctcgaagccaccaaccaccagacgcttgaggtacagttccggcgcgatacgcaggtacatgtcgagatccagcgcgttatggtgggtgataaacggacgcgcagcggcaccgccagggatcacctgcatcatcggcgtttcaacttccataaagccgcggttcaccatgaactggcgaataccagagaggatctggctgcgcactttaaaggtgttgcgggattcatcgttggagatgagatcgagataacgctgacgatagcgcgcttcctgatcctgcaagccgtggaatttatccggcagcggacgcagtgctttggtcagcagacgcaactcggtgcagtggatagacagttcgccggttttggttttgaacagcttacctttcgcgccgaggatgtcgccgaggtcccattttttgaactgctcgttataaacgccttccgggagatcgtcacgggcaacgtacagctgaatgcgaccgccaacgtcctgcagggtaacgaaagacgctttacccataatacgacgggtcatcatgcggccagcaacggcgacttcgatgttcagcgcttccagttcttcgttctctttgccgtcgaattctgcgtgcaattggtcagaggtatgatcgcgacggaaatcgttcgggaaggcaatcccctgctcgcgcaggttcgccagcttctcacgacgcgttttcagttcattgttaagatcgactaccgcgtcagcgccctgtgcgtgttgttcagacatgttggttcctcataaccctgctttcaaacttgcttcgataaattgatccaggctgccgtccagcacggcctgcgtgttgcgggtttctaccccggtgcgcagatctttaatgcgggagtcatcaaggacataagaacgaatctggctgccccagccgatgtcggatttgttatcttccatcgcctgtttctcggcatttttcttctgcatctccagttcataaagcttcgctttcatctgcttcatggcctgatctttgttcttgtgctgggaacggtcgttctggcactgggtcacgatcccggtcgggatgtgggtaatacgcaccgcagattcggtacggttaacgtgctgaccgcccgcgccggacgtgcgataaacgtcaatgcgcagatccgccgggttgatttcgatatcaatatcatcatcaacttccggataaacaaacgcggagctgaagctcgtgtggcgacgaccgccggagtcaaacgggcttttacgcaccaggcggtgaacgccggtttctgtacgcagccagccgtaagcgtaatcgccggagattttgatcgtcacggatttaatacccgccacttcaccttcgctctcttcgatgatttcagttttgaaaccacggctttctgcccagcgcagatacatacgctcaagcatgctcgcccagtcctgtgcttccgtaccgccagaccccgcctgaatatcgaggtagcagtcggcgctgtcatattcgccagagaacatacggcggaactcaagctgcgccagtttttcttccagggcgtcgagttcagcaacggcttcgttaaaggtttcttcgtcgtcagcttctacagccagttccagcagaccagaaacatcttccagcccctgtttcatttggtcgagggtgtcgacaacggcttcgagggaggaacgctctttacccagcgcctgtgcgcgttcgggttcgttccagacatccggctgttccagctcggcgtttacttcttccagacgctctttcttggcgtcgtagtcaaagataccccctaagaacgtcggagcgttccgtgaggtcctgaatgcgattatttaccggattaatttcaaacatggtctgatttcttttattgagctagtcaaaatgcggtgataagagcgggattgtacccaatccacgctcttttttatagagaagatgacgttaaattggccagatattgtcgatgataatttgcaggctgcggttgccgcgaaactcgttgatatcgagcttataagccagttgcacttcgcgcacgccgttatccggccagagggcggtatcgacattaaaagcaataccatccagcagtggaccgccgccgaccggttcgaccatcaccttcaaatgacgttcgcccaccagccgctgttgcagcagacggaaatgaccgtcaaacagcggctccgggaacatctgcccccacgggccagcatcgcgcagcagctgcgccacttccatggtcatttcggccgggcttaacggaccgtcacttaccacttcgccttgcaataggctagggtccagccactcagtaaccagttcgccaaaccgttgttgaaagagtttgaatttatcctcttccaggctcaaacccgccgccatcgcatgaccgccaaacttcagcatcatgccagggtagagtgtgtctaatcgctccagcgcatcacgcatatgcagcccctgaatggagcgaccggaacctttcagcgtaccgtcacctgctggcgcaaacgcgataaccggacggtgaaaacgctctttgatgcggctagccagaataccgacaacgccctgatgccattcggggtgatacattgccagcccgccgggtagcgtgtcacggctgcgctccagtttctcgcacagggtcagggcttcaatttgcattccttgttcgatctcttttcgcgtctggtttagcgcatcgagttcatttgccagcacgcgcgcttcgccgatgttgtcgcacaacaacagcgccacaccgacggacatatcgtccagtcgtccggcagcattgagacgtggccccagcgcaaaacctaaatcgctggcggcgagtttttgtgcatcacggtttgccacttcaagcagcgctttaatccccggacggcactttccggctcggatgcgactcatcccctgccaggtcagaatgcgattattagcgtccagcggcacgacgtccgccactgtccccagcgcgaccagatccagcagttctgccaggttaggaattgcgatgttacgctcatcaaaccagccctgatcgcgcaaaaaggtgcgcagcgccagcatcagataaaacgccacacccacgcctgccagacttttgctcgggaaattacagtcgcgcaagttagggttaatgatcgcttccgctgcgggtaatgtgtcgcctggcaaatggtgatcggtaacaataaccgggatgcccaagctgcgagcgtgctcaacccccgcatgggaggaaataccgttatccaccgtgacaattaactgcgcgccacgggcatgggcctgatcgaccacttccgggcttaagccgtaaccgtcttcgaaacggtttggtaccaggtagtcgatattgctgcaaccaaggctgcgcatcgccagcacgcttagagccgtgctggtcgcgccgtcggcgtcgaaatcaccgaccacaataatccgcgttccttcgcgaaaagcgttgtaaaggatctcaacggccttttcgacgccgctcagttgctgccagggcagcatacctttaacactgcgttccagttcttgcgcactgcgtactccccggctggcgtataaacggcgcagcaagggaggcaattcagcgggcaagtctgccgtttcatcgacttcacggcgacgaagttgtatctgttgtttcacgcgaattatttaccgctggtcattttttggtgttcgtcgaggaattctttcatctctttcggcggctggtaacccggaacaagtgtgccattgctcagcacaactgccggagtaccgctaacgccaagctggacgccaagtgcgtaatggtcggcaatatccacgtcgcaactggctggtgcgacgcttttacctgccatcacatcatcaaacgctttgtttttatctttcgcacaccagatagctttcatttctttctctgcatcgctgtccagcccctggcgcgggaaagcaagataacgcacggtgatccccagcgcgttgtagtctgccatttgctcatgcagtttgtggcagtaaccacaggtaatatcagtaaacacggtgatgacgtgtttttcctgcggcgctttataaacgatcatctctttttcaagcgcattcaactgctttaacagcatcttattggtgacattgaccggagccgtgccactaacgtcatacattggcccctgaatgatatgtttaccatcatcggtgatgtacaacacgccgctgttagtcagaactgtcttcatgccagctacaggcgcgggctgaatatcgctgcttttgatgcccattttggctaacgtttgttgaattgccgcgtcatcagcctgagcaaagccactaaacgccgctaacaaagtaaacaacataaaacctttcttcataaatcttcccgttcttttcagacatcacgcccgcgggtgatgctgttgatgaagttgccgcagacgctcggtagcgacatgcgtataaatttgcgtggtggagagatcgctgtggcccagtagcatctgcaccacgcgtaaatccgcaccatgatttaataaatgagtggcaaaagcgtgacgcaacacatgcggactcagcttttcgctgtcgatacccgccagcacagcataatgtttaatacggtgccagaaggtctgtcgcgtcatctgctgcgcacgctggctgggaaacaacacgtcaatactcacaccattcagcagccacggacgcccatgttccagataggtttccagccagtaaaccgcctcttcacctaacggcaccagacgctctttgttgcctttaccaatgacccgtaccacgccctgacgcaggctgatatcactcattgtcagtccgaccagttcagagacacgcagcccggtagcatacaacacttcaagcatggctttatcgcgtagctccagtggctgatcgattaatggtgcctgtaataaacgttcgacctgcgcttcgcttaaatcttttggcaaacgctggggcaatttcggactagcgagatgcgcactgggatcgtcttcacgaaacttttcgcgataaagatactggaacaatcggcgcactgcactcagcaaacgcgcactgctggtggctttatacccgccctccagccgttctgccagtaatgcctgcaaatcgtcactttgcgccgtcgccagcgtcaacccgcggtgatgcaaccactccaccatcatactcagatcgcgacggtaagcgttcaacgtattttcagccagatttttttccagccacagagcatcaagaaactgctcgatgcgtgccagatcctgtttcacttgcgccccttatggtcactcatttgatccattatgccttattgtgccgtgactaaagcgattctgatacactagccgcaaaagccacagcagaatcgagaagcttacgttatgaatatgggtcttttttacggttccagcacctgttacaccgaaatggcggcagaaaaaatccgcgatattatcggcccagaactggtgaccttacataacctcaaggacgactccccgaaattaatggagcagtacgatgtgctcattctgggtatcccgacctgggattttggtgaaatccaggaagactgggaagccgtctgggatcagctcgacgacctgaaccttgaaggtaaaattgttgcgctgtatgggcttggcgatcaactgggatacggcgagtggttcctcgatgcgctcggtatgctgcatgacaaactcagcaccaaaggcgtgaagttcgtcggctactggccaacggaaggatatgaatttaccagcccgaaaccggtgattgctgacgggcaactgttcgtgggtctggcgctggatgaaactaaccagtatgaccttagcgacgagcgtattcagagctggtgcgagcaaatcctcaacgaaatggcagagcattacgcctgatctcactgacggcttagcgcatatgctttgccgtcatctttatctttgcgtctcttgttgcaacaaaatccgccgtaaatcccgccattcagcttcgtccatgctgtcggctgccagccataaatgttgccgtttaccgccatcagaacgtaaacgcagcatcatgccgctcttaatcatccacggtgctttgacgatgctccactcctgcccttgccaacgcaaacgcccgtccatcaacaagcgaatttccccctggcgagcattaatacgccgctggctgcgaacgcaatcaaacaccaccaggctaagtaacaccatccataacggggtgtaactgagtggccagggcatgagtaaaataacagcggcaaccagcccatgaatcagcaaggaaagccactgtgcgcgccaggagacgcgcaaatcagattgccacaggaccacgttcccggttccgtgtctggatgagtcggaccatcatttccagttctgcatcggccggtttaccgtgattcatcagccagttaaacaggtccggatcgtcacattccagcagacgaataaagatgcgtttttcgtcatcgcttaagctgtcgtactcatgttcgaaaaacggcatgatactaatatcgagttcgcgcataccacggcggcatgcccaatgaatgcgggctttgttgttaatgtccatcttcttcctgtctcacgaaaatccagtacccggctattgtaacgtgtttttcgccttcttttacgggaatatcagtaaacaccatcgcgatcgcgaaattaattcacaacaattcaatggcttcatttttttggaagtcgcctcgcagaaggcacagatcgcgtagtgaaagcacttgcattgcctcatagctcttttaccattagtcattaatacgccgttaagcaactcaggactctattatggcttttacaccttttcctccccgtcagcctacggcttctgcccgtttaccgctgacgctgatgacgcttgatgactgggcgcttgccaccattactggcgcggacagcgaaaaatatatgcagggtcaggtgacagcagatgtcagccagatggcagaagatcagcacctgctcgccgcccattgcgacgccaaaggtaaaatgtggagcaatttacgtctgttccgcgacggcgatggctttgcatggattgaacggcgcagcgtgcgtgaaccgcagctgactgaactgaaaaaatatgcggtattctctaaagtgaccatcgcgccagacgacgagcgtgtgctgcttggtgttgccggttttcaggcgcgcgccgcgctggcaaatctctttagcgaactgcctagcaaagaaaaacaggtagtcaaagaaggcgcgaccactttgctatggtttgaacacccggcagaacgtttcctgatcgtaaccgatgaagctactgctaatatgctgaccgataaactgcgcggtgaagcggaactgaacaatagccaacagtggctggcattaaacattgaagcgggtttcccggtgattgatgccgccaacagcgggcagtttatcccacaggcgaccaatctccaggcgctgggcggtatcagctttaagaaaggctgttataccggacaagagatggtggcgcgagcaaaattccgtggtgccaataaacgtgcgctctggttgctggcaggtagcgccagccgactgccggaagctggtgaagacttagagctgaaaatgggcgagaactggcgtcgtaccggtacggtactggctgcggtaaaactggaagatggtcaggtcgtggtacaggtcgtcatgaataacgatatggaaccggatagcatcttccgcgtacgcgacgatgcgaatacattgcatatcgagccgctgccgtatagcctcgaagagtaaatctctttatcgcatcaggcatttatcgcctgatgcgacgctggcgcgtcttatcatgtctgggatttgatgcctttatcacaacagggacgaggcccgtagatcggataaggcgttcacgccgaatccggcagttgtgctccgatgcctgatgcgacgctggcgcgtcttatcaggcctacaaaggcatacccattacgcctgcccaatatacaaatagatcgccagaaagtggcacacactaccgccgagcacgaagccgtgccagatggcatggttgtatggaatgcgtttgcagacgtagaaaatcaccccgaggctataaaccacgccgcctaccgccagtaaggtaacgctgcccgccgcgagcttaactgccatttcataaattaccaccaggctcagccagcccatcgccagataggtcaccagagataaaattttgaatcggtgcgcgatggtcagtttaaacagaatacccagcaatgccaggctccagataacaatcatcaacccgcgcgctaacggagaatccagccccaccagcaaaaacggcgtgtaggttccggcaatcaacaggtaaatagcgcaatggtcaaatttcttcagccacatttttgcccgttgatgaggaatggcgtgatagagcgtgctagcgaggaacagcaggatcatactgccgccatagaggctgtagctggttatcgctgtggcgctggcattaagatccaccgcctgaaccagtagcaacaccagcccaacgataccaaacaccaacccaatgccgtgactgacgctgttggctatttcctctgccagactatatccctgcttaatgaggggcttctgaaccataacttactccggagaaacgtacacgcacatgtatacctctccagcgtaactgagaatagttccagtgaacacctgttagctaaaataaattctgatttgagactaatctcctaaaaatcatgaaattaaatgcgaaatttcaactaacaggcgtgagttcaatttaaagacatttaaattcaatcacataaaattgtgtctgaccgggatagatgtcagcaatgacttttttcagttcagtcagggtcatattttcctgctctgcatgtttttcagtcagcgtatccagcgttacggtactggttgcggtgacttcaatcgtgcaaaaataaccgtcatcttcaaaacgtccgacacgaagcacatcacccgttttgaagtggctttcagactcgtcgcggatggtgatggttttacgcccagccagaatgtcatcctggaaacgttgaaaaaaagtgatgtcgtttggctgcatggtactatttcctgtaagaattgactcatctggagcctatgatagtgaaaaaactcaccttaccgaaagatttcttatggggcggcgcagttgccgctcatcaggtcgaaggcggctggaacaaaggcggaaaagggccgagcatttgtgacgttctgaccggtggcgcacacggcgtgccgcgcgaaatcaccaaagaagtcttgccaggaaaatactatccaaaccatgaagccgttgatttttatggtcactataaggaagacatcaagctatttgccgaaatgggcttcaaatgttttcgtacatccattgcctggacgcgcatttttccaaaaggcgatgaagctcagccaaacgaagaagggctgaagttctacgatgatatgttcgatgaactgctgaaatacaacatcgaaccggtgatcaccctctcccactttgaaatgccgctgcatctggtgcagcaatacggtagctggaccaaccgtaaagtggttgatttctttgtacgtttcgcggaagtggtatttgaacgctataagcacaaagtcaaatactggatgaccttcaacgaaattaacaaccagcgtaactggcgtgcaccgctgttcggttactgctgctccggcgtggtgtataccgagcatgaaaacccggaagagacgatgtatcaggtgctgcatcaccagtttgtcgccagcgccctggcggtgaaagctgcgcgtcgcattaacccggagatgaaagtcggctgtatgctggcgatggtgccgctctatccttactcctgtaacccggacgatgtgatgttcgctcaggagagcatgcgcgaacgctacgtctttaccgatgtgcagctacgcggctattacccgtcctatgtgttgaacgagtgggagcgtcgcggatttaacatcaaaatggaagacggcgatctggatgtgctgcgtgaaggcacctgcgattatcttggtttcagctattacatgaccaatgcagtgaaggccgaaggcggcaccggcgatgcgatctctggttttgaaggcagcgtaccaaacccgtatgttaaagcatctgactggggctggcagattgatccagtaggtctgcgctatgcactttgcgaactgtatgagcgttatcagaggccgctgtttattgtcgaaaacggttttggcgcttacgacaaagtggaagaagatggcagcatcaacgacgactaccgcattgactacctgcgcgcccatatcgaagagatgaaaaaagcggtgacttacgatggcgtggatctgatgggctacacaccgtggggctgcatcgactgcgtgagcttcaccaccgggcagtacagcaaacgctacggctttatctatgtgaataaacatgacgacggtactggcgatatgagccgtagtcgtaagaagagctttaactggtacaaagaggtgattgccagcaacggcgagaagctttaagtcgatgaagtaccggatgcaatacttgttgcatccggtcagacaacttccctgttttatttcccgcccgccaaatcgataaaacttcccgtgacgtaagaggctttatcacttagtagccagacaatggcctgcgcgacctcttctgcctgtccaccacgctgcatggggatgttgctcttaacgcgatcgacgcgtccaggctcgccgccgctggcgtgcatttcggtataaataaaccctggccgcacgcagttaacgcggatcccctgcgcggcgacttccaggcttagtccggtggttaacgtatcaatcgcccctttgcttgccgcgtaatcaacatattcccctgggctacccaaccgactggccacgctagagacattgacgatagcgccgccactgccaccatttttaagcgccatgcgttttaccgcctcgcggcagcagagaaaatatcccgtcacgttggtggaaagtactcggttgattcgctctgcggtaaggttttcaacggtgcactgggtaaacaagatcccggcgttattgaccagcgctgctagcggttcatcgtgctgatcgattgctgtaaacatcgcaacgacctggttttcgtcgctgatatccgcctggagcacgaatgctttgccaccggcttgcgttattaagttcatcacttcctgcgccgcgtggaggttttgctgataattaaccgccaccgtatacccttcttgcgccaacagtaatgcagttgcccgcccgatgccgcgactgccaccagtcacaagtgctatagccatttgtttttccgagaaaaattaattcgttgacgtatctttgagattgctaacaaactggctcaatcttcaatgttggcacgcttttccccctcgccctttcagggagagggccggggtgagggtaaatattcgcgccagtgccggcctgttcccctcaccctaaccctctccccaaaggggcgaggggactgtctgagcacttttgtactttgtcatctgactaaaaaggcgccgaagcgcctttagaaaatagtcgaatcagtgaattactggtattcgctaatcggtacgcaggagcagaacaggttacggtcgccgtaaacatcatccagacgtttcactgtcggccagtatttgtctgccacacctgccgggaataccgcaacttcacggctgtacggatgcgcccactcggcgaccagttcgctctgaatgtgcggcgcgttcaccagcgggttatcttccagcggccagacaccggctttcacctggtcaatttctgcgcggatagccagcatcgcgtcgataaagcgatccagttccactttgctttcagattcagtcggttcaaccatcagcgtacccgccaccgggaagctcatcgtcggcgcgtggaaaccgtagtcgatcaggcgcttggcaatatccagctcgctgatgccggtttcttctttcagcgggcgaatatcgagaatacattcgtgcgccacgcgaccgtcgcgaccggtatacagcaccgggaaggcatcctgcaggcggctggcaatatagttggcgttgaggattgccacctggcttgcttttttcagcccttctgcgcccatcatgcggatgtacatccagctgattggcaggatagaggcgctaccgaacggtgccgcagaaaccgcgccctgacgggttaacatgccttcgatttgcaccacgctatgacccggtacaaacggtgccaaatgcgctttcacgccgatcggtcccatacccggaccaccaccgccgtgcggaatgcagaaagttttatgtaggttaaggtgactaacgtccgcaccaataaagcccgggctggtgatgccaacctgggcgttcatgttcgcgccatcaaggtaaacctgaccgccgaactgatgcacgacttcacacacttcacggatcgtttcttcatacacgccgtgggtagaaggataagtcaccatgatacaggagaggttatcgcccgcctgttccgctttcgcgcgcagatcagtcagatcgatgttgccgtttttatcacacgccacaaccaccacctgcattcctgccatatgtgcagaagcggggttagttccgtgcgcagaagccgggatcaggcagatatcgcgatgcccttcgttgcggctttcatgataatgacgaatcgccagcaggcccgcgtattcgccctgtgcgccagagttcggctgcatacaaacggcgtcgtaaccggtcagtttcaccagccagtcagccagctgcgcaatcatctgctgataaccttcggcctgctccggcgggcagaacgggtgcagttcggcaaattccggccaggtgattgggatcatctcggcggcggcgttcagtttcatggtgcaggaacccagcgggatcatcgcctgattcagcgccagatctttacgctccaggctgtgcatatagcgcatcatttcggtttcgctgtggtagcgattaaacaccggatgggtgaggatttcgtcgtcgcgcagcatcgcaggctggatagagcggctgtcgtgagccacgtctttgtccagcgtgtcgatgtccaggccgtggttatcgcccagcagcacgttgaaaagctgcattacgttttcacgcgtggttgtttcatcaagggtgatcccaaccgcgttcagaatatcgctacgcaggttgatttcagccgcttcggcacgcgtcagtacgcccgctttgtcggccacttccacacacaaggtgtcgaaatagtgcgcatggcgcagtttcagacctttttgttgcaggcccgccgccaggatatcggtcagacggtgaatgcggttagcgatacgtttcaggccaaccgggccgtgataaacggcatacaggctggcgatgtttgccagcagtacctgggaagtacaaatgttggagttcgctttctcacggcggatatgttgctcgcgagtctgcatcgccatgcgcagcgcggtattgccagctgcatctttgcttacaccgataatacggcccggcatactgcgtttgtattcatctttcgccgcaaagaatgccgcgtgtgggccaccgtagcccatcggcacgccgaagcgttgcgcgctaccaaaaacaatatccgcgccctgtttacccggcgcagttaacagcaccagcgccataatatcggcggcaacgctgaccacaattttgcgacttttcagttcgctaataagcgcagtgtagtcgtgaatttcaccggtagtgcctacctgctgtaacagcacgccgaagacgtcctgatggtcgagcactttttgcgcgtcatcgacaatcacttcaaaaccaaaggtttcggcacgagtacggaccacatccagcgtttgcggatgcacatcggaagccacgaagaagcggttggcatttttcagtttgctgacgcgtttcgccatcgccattgcttcggcggcagcggtggcctcgtccagaagagaagcagaggccatatccagtccagtcaaatccagcgttacctgctggaagttgagcagtgcttcaaggcggccctgggagacttcaggttgatacggagtgtacgcggtataccagcccggattttccagcatgttacgcaggataaccggcggtagctgcacggcggtgtaacccatgccgatgtaagacgtgaagcgtttattgcgactggcaatagccttgagttctgccagtgcggcgtattcggtcgccggtgcgccaacctgcggtggtgtcgcaagttgaatatctttcggcacaatctggccggtcagcgcgtttaagctttgtgcaccaacggcattcagcatttcttgctgttgcgcggcgtccggtccgatatggcgttcaataaaagcgccgctgttttcaagctggcttaacgtctgtgtcatgagcgatggttcctgaaacgtgcagtgaattgtgaacctctctccttacgaagagagtgagggtgaggcataaattttcctcaccctgatcctctcccgcagaagaggaataaagccgttactcgtcttctaacaatgcttcgtatgcggtcgcatccagcagactttccagttcgctttcatcgctggctttgattttaaagatccagccgcctgcatacggttcgctgttcaccagttccggggaatcgctcagtgcgtcgtttaccgccacgatttcaccgcttactggcgcataaatgtcactcgccgcttttacgctttcggcaaccgcgcagtcatcgcccgcgctaaccgttgcgcccacttccggcaggtcaacaaacaccatatcgcctaacagctcctgagcatgttcggtaataccaacggtgtaagtgccgtcggcttctttacgcagccattcgtgttctttgctgtatttcagttctgctggtacgttgctcatcaatcaatctccaaaaaagtaaatcacgcgacggctttgccgttacgcacaaaaacaggttttgtcactttaaccggcatttcacggttgcgaatttgcacaatcgccgtttcgccaataccttccggcacgcgcgccagcgcaatgctgtaacccagcgtcggggagaaagtaccgctggtgataatgccttcatgctggttgccctgcgcatcggtaaagcgtaccggcagttcattacgcagcacgcctttttcggtcatcaccagaccaaccagtttttctgtaccatgctcacgctgcacttccagggcttcacgaccgataaagtcacgatctgccggttcccaggcgatggtccagcccatgttggcggctaaaggagagatggtttcgtccatctcctgaccataaagattcatgcccgcttccagacgcagcgtgtcacgcgcgcccaagccacatggcttaacacccgcttccaccagcgcacgccagaaatcggccgctttttcattgggcagcgcaatttcatagcccgcttcaccggtataaccagtggtggcaataaacagatcgcccgcctgcacgccaaagaacggtttcatcccttccaccgcctgacgctgggcgtcattaaacagtgtggcagcttttgcctgcgcattcggcccttgcacggcaatcatggaaaggtcatcacgaacggtaatttcgatgccgaaaggttcagcgtgttgggtaatccaggagaggtctttttcgcgggtggcggagttaacaacgaggcggaagaaatcttcagtaaagtagtagacgatgaggtcatctatcacaccgccagaggcattcaacatcccgctgtaaagggctttgccgcttttggtgagcttcgccacatcgttcgccagcagataacgcagaaactcccgggtgcggctgccgcgaagatcgacgatggtcatatgactcacatcaaacattccggcatcggtacgtaccgcatgatgttcgtcgatttggctaccgtaatgcagcggcatcatccagccgtggaaatccaccatgcgagcgccgcaaagcgtgtgttgttcgtacaaaggagtctgttgtgccatcttgtcctcattgaataagcggggctgacaactttttcatggtgaaattatcaccacgaaacccagcatcggagccactcccggtccccaacgcaatcgttctcttttgcctgaacttaccaccgaaacagactgttaaccataaggtaaaattgatcatcacattagcttatggttaaaaaatgcaaaaatcgcgacagaataaaaaaccaaaaaatacaccagtttctatacaaagatgatgtgatgagaaagtcaatttgaataagacaatattaagagctaaaaaaatgtcaaaaaacactaaatcaaaaaataatggcattagaaaatataatgcgaaaacggaggtgaaattagtttatttcaaatgaggaaaatctcccggcgaaaaaaccgggagatgaaagtgtgatgggtatcaaataaacaacagaggagaaatttttaacgcagccattcaggcaaatcgtttaatcccattgcctggcggataagttgcggcttaacgccaggaagcgtgtcggccagtttcaaaccaatatcacgcagcagttttttcgccggattggtaccggaaaacagatcgcggaatccctgcataccagccagcatcaacgccgcactgtgcttgcggctacgctcatagcgacgcagataaatgtactgcccgatgtctttcccctgacgatgcaaccgtttcagttcggcaatcagctctgcagcatccataaagccgagatttaccccctgccccgccagcgggtgaatggtatgtgcggcgtcgcccaccagcgccagacggtggctggcaaactggcgcgcataacgccccgtcagtgggaacacctgacgcgcgctctcaaccttgcataagcccaggcgattatcaaaagcgatatttaacgcgcgattaaattcgtcttcacttgcctgctgcatccgctgcgcttcctctgggctcagactccagacaatgctgcaaagatgcggatcgctaagcggtaaaaaggccagaatgccttcgccatggaaaacctgccgcgccaccgcatcatgcggttcttccgtgcgaatggtcgctaccagcgcgtgatgctgataatcccagaaagtcagcggaatatcggctttgttgcgcaaccaggaattagcgccgtccgcgccaatcaccagacgcgccgttaacatgctgccatctttcagcgtcaggaaggtttcattttctccccaggcgacctgctgtaattctgcgggggctaacagagtgatatcactgctctgatgcgctttgttccacagcgcgtagtgaatcacactattttcaacgatatgcccaagatggctatagcccatgctttgatcgtcaaagctaatgtgaccaaagctgtctttgtcccacacttccataccgtgataacagctggccctacgagagagaatgtcctgccagacgccaagacgggtgagtaatttttcgctggcggcattgatagcgctaacgcgcagttgtggtggtgcattcgccgccagaggttcctgtacgcgctgctccagtacggcaacgcgtaagccgctcccctgtaagccacaggcaaccgccagccccaccatgccgccgccaacaatggctacatcaacactttgcattgtttattccttaaaaccgccttcaacgcgccacccaaccgagggtgcgctgcgccagcacatcgcgtgccggggtgaataattccatcgtcatcagcccgatgttgcgcccgacaaccagcggtgcccaacggttggcaaaaagatgtacaaggctgtccgtgacgccaatggttgcttcgcgatcgctctgtcgacgctgctgataacggcacaatacgccgtaatcccccatgtcttctccgcgctcctgcgcctgagtcagggtttccgcaagactcatcacatctcgcataccgaggttaaacccttgcccggcaatcgggtgcagagtttgcgccgcattgcccaccagcacggtacgatgggtaatagatctggcggcgtgggttaacgccagcggataagcactgcgtttaccagcgtgggtaattttcccaagtcgccagccaaaggcgctctggagttcacggcaaaacttctcgtcactccagctcaacacctcttcgcgccgttccagtggatgacaccagaccaggctacagcgtccgtcagacatcggcaacatcgccagcgggccatgttgcgtaaagcgttcaaaagcgcgcccttcatgcgcaacggaagtagcaacgttggcaatcacggccagttgttcgtaaggctcctgctgccagtcaacgccgcacgcggtggctaacgcactatgggtgccatcagctgctaccagcacgcggcccgtcagcgtctcgccactctccagcgtcacttcaacgtgactctgagtacgggcaacgttagccacgcgatcagggcaatgcagcgttacgccaggtgctttacgcagcaatgcaaacagccgttgcccgacattgtgcaattcgacaacctgtcccagcgccgccagttggtaatcttctgcggcgagggtgacaaatccagcgtgaccacgatcgctgacatgcacggtggtgatggcagttgcgcaatccgccagagattgccagacgccgatgcgcgccagttgctgacaggtacccgccgccagcgctatcgctcgtccatcaaagcccggatgagcatgactctctggcgcagtcgcttcaatcaaatgtaccggcagcgccccgtgacttaaccgggaaatagccagcgccagcgtcgcgcccgccatgccgccaccgacgatgattacgctcattgctttctcgcagcaaccatcaacgcttcgatttcttccggctttttcaccacgctggcggtgaggttttcgttaccggtttcggtaatcacaatgtcgtcttcaatacgaatgccgataccgcgatattgttctggcacttctgcatccggcgcaatatacagccctggttctacggtcagtaccatgcccggttccagaatgcggctgcgatcctgaccataaacacccacgtcatggacatccagtcctaaccagtggctaaggccatgcataaagaaaggacgatgggcgttctgagcgatcagttcatcaacatcacctttcaggatgccgagttttaccaggccgctaaccatgatgcgcaccacttcaccagtgacttccagaatggaagttcccggacgatacaggcgcaggctggtttcgagagactccagcacaatgtcgtagatttcacgctgggcctgggtgaatttgccgttgaccgggaaggtgcgggtaatatcgccagcgtaacctttgtattcacaacccgcgtcaatcaacaccaggtcgccgtcgcgcatttcacactcgttttcggtgtagtgcagaatgcagccgttttcaccgctgccgacaatggtgttataggacggatagcgcgcaccgtggcggttaaattcgtggtgaatttcgccttccagatggtactcgaacattcccggacggcatttttccatcgcccgtgtatgtgccatggcggtgatttctcccgcgcggcggagtacggcaatctcttctgggcttttgaacaggcgcatttcatgaacaacaggacgccagtcgatcatcgttgccggtgcggtgagattttgccggctacctttacgcagtttttccagcgcactgttcacgattacatcagcatatgcatattcgccctgggcatggtaaaccacatccaggccgttaagtagttgataaagttgctgattgatttcgctgaatgccagtgcgcggtcaacgcccagtttctctggcgcggcatcctggcctaagcgacggccaaaccagatctccgccgtcaggtcgcgaacgcggttaaacagaacgctgtggttatgagtgtcatcgcttttaatcagcaccagcaccgcttccggttcgttaaagccggtgaagtaccagaagtcactgttctgacgataggggtattcgctgtcggcgctacgtgttacttctggtgcagcaaaaatcagcgcggcgctgccgggttgcatttgctccaccagggcctgacggcgacgctgaaactcttgccgggatatctcactcataacactctccttacgttttttgtttttagtgtagagtcggtttttgtacttctggcgcggtcggttgcggatgagtaaaggtgtcgtggcataacagcgcggcaacacgaacgtattcgatgatctcttcaaggctcatttcaagctcttcctgatcttcgtcttcgtcgtaacccagttgcgcaatgttacgcagatcgtcgatagcttcaccggtttcgccggtcactttatccagcttcggttgcgtaacgccaagaccaagcaggaagtgattgacccaacctgccaatgcatcagcccgatcgaaaacgctgacatcatcgccatcaggcagataaagctgaaaaaggaagccgtcatcctgcagggcatcgctggtggcagagtgcattttacgcagtgcctgtgccagctcatgaccgaaagccatgccttcgttcgtcaggtcgtgaagtagcggtagccaactgctgtcatcgttaccgccacatatcatcccgctgattaaaccatgcatctcagctggggtcagacccgtcccttgttggttcagatactggttcatttcgttgtaaccaggcatttcgttctgtatagacataagcattcgtcgtcaaagggaggaatattcatgatatgctaccactttgggccctggtggaccagaaaagggcttgtctcttctcatcagggtagctatagtgtcgccccttcgcagaccatgggtctaaagacgaaggcagcgcagtcaatcagcaggaaggtggcatgtctgcacaacccgtcgatatccaaatttttggccgtagtctgcgtgtgaactgcccgcctgaccaaagggatgcgttgaatcaggcagcggacgatctgaaccaacggttgcaagatctgaaagaacgcactagagtcacaaatactgaacagttggtcttcattgccgcattgaatatcagctatgagttagcgcaagaaaaagcaaagactcgtgactacgcggcaagtatggaacagcgtattcggatgctgcagcagaccatagaacaagcgttacttgaacaaggtcgcatcaccgaaaaaactaaccaaaactttgaatgacacttttcggtttactgtggtagagtaaccgtgaagacaaaatttctctgagatgttcgcaagcgggccagtcccctgagccgatatttcataccacaagaatgtggcgctccgcggttggtgagcatgctcggtccgtccgagaagccttaaaactgcgacgacacattcaccttgaaccaagggttcaagggttacagcctgcggcggcatctcggagattcccttcttatctggcaccagccatgacgcaactaccagaactcccactgacattatcccgacaagaaatccgcaaaatgattcggcaacgtcgtcgtgcgttaacgccggaacaacagcaggaaatgggtcaacaagccgctacccggatgatgacttatcccccggtggtgatggcacatacggtcgctgtattcctctcttttgatggcgaactcgacacccagccactcatagaacaactctggcgcgccggtaagcgcgtatatcttccagttttgcatccctttagtgccggtaatttgctgttcctgaattaccatccgcaaagcgaactggtgatgaacaggttgaagatccatgagccaaaattggatgtgcgtgacgtgctacccctttcccgattagacgtgctgatcacaccgctggtcgcctttgatgagtacggtcagcgcctgggaatgggcggtggtttttatgatcggaccttacaaaactggcagcactataaaacgcaaccggtgggttatgcgcatgattgtcagttggtggaaaaactccccgttgaagagtgggatatccctcttcctgcggtggttacaccgagcaaagtctgggagtggtaagggcgatacacccgcatcgccctgattgacatcgttgattctttgacctaatttagtgagtaagggtaagggaggattgctcctcccctgagactgactgttaataagcgctgaaacttatgagtaacagtacaatcagtatgatgacaagtcgcatcataacccttctccttcaagccctcgcttcggtgagggctttaccgttacagccccatgctgccctgccatcgtaaatccccattaaataaacacaacgcattgatctgactttgatttattttctggagcagactcgcaaagtagaatgcgcaacgcggcaacggtgtggagaagggataaaaaaacgggcaagtcagtgacctgcccgttgattttcagagaaggggaattagtacagcagacgggcgcgaatggtacccggaatagctttcattgcctgcagcgctttttcggcaacgtcttcgtcggcttcaatatcaataaccacataacccatctgggcggaagtttgcagatattgcgcggcgatgttgacgccctgctcggcgaagattttgttcagcgcagttagcacgcccggacggttttcgtggatgtgcatcagacgacgcccaccgtgcagtggcaggctgacttccgggaagttcaccgcagagagcgtactgccattgtcagaatacttgatcaatttacccgcaacttccaggccgatattctcctgcgcttcctgagtgctaccgccaatgtgtggcgtcagaaggacgttgtcgaattcacacagcggagaggtaaatggatcgctattggtcgccggttccgtcgggaatacgtcgattgccgcccccgccagatgtttgctcgccagcgcatcacacagcgccggaatatccaccacagtaccgcggctagcattaatcagcaggctgccgggcttcattagactaatttctttcgcgcccatcatatttttggtggacggattctctggtacatgcagactcaccacatcgctcatattcagcaggtcagaaagatgctgtacctgagtggcgttgcccagcggcagtttattttcaatatcataaaagtaaacatacattcccaggctttcagccagaatgcccaattgcgtaccaatatgaccgtagccgatgatacccagctttttgccgcgcgcttcaaaagaacccgccgccagtttgttccacacgccacggtgcgctttagcattggcttccggcacgccgcgcaatagcagcagcagttcgccaatcaccagctccgcaacagagcgcgtattactgaacggtgcgttaaataccgggatcccgcgctttgccgccgcatccagatcaacctggtttgttccgatacagaaacagccaatagcgaccagtttttctgcggcgttgatcacgtcttcagtcagatgggtacgggatcgcaggccgatgaagtgggcatcgcggatggattcttttaattgttcatcatccagcgcgcctttgtgaaattcgatgttggtgtaaccagctgcacgaaggctttccagcgccttttggtgcacgccttctaccagcagaaacttaatcttgtctttctccaggcttacctttgccatttacccaatcctgtcttttgaaatgttgtgtgcggatttgcatccgcctttcaacatatcaaaaaataatattgcggcaatatgaacgtttgcgtcgcgatgttgaggaaatatcacgcaaaggtaattcttggatgaatatgctggtttagaggatttatttagagcaatcgacaattgcctggtaaaagcgtgacacatgtcaccaaatttaatgaagagaatttttttaacgggggaggttcccccgtcagatcatttcacaatggttttgacaccgtcaggtgtgccaatcagcgcaacgtccgcgccacggttagcaaacaagccaacagtcaccacgccaggaatcgcatttatggcgttttccatcgctatcgggtcaaggatttccatgccgtggacgtcgaggatcacgttgccattatcggtcaccacgccctgacggtattccggacgaccgcccagtttcaccagctgacgcgccactgcactacgtgccatcgggataacttctactggcagcgggaatttacccagaatatcaacctgcttggaagcgtctgcaatacagataaatttttctgcaacgctagcaatgattttttcacgggtcagcgccgcgccgccgcctttgatcatttgcatgtggccgttgatttcatctgcgccatcaacgtagatgccaaggctgtcgacttcgttgagatcaaaaacgtgaatgccgaggcttttcagtttttcagtggaagcatcactactggaaacggccccttcaatctggcctttcattgtaccgagcgcgtcaataaagtgtgcggcggtggaacctgtacctacaccaacaatggtgccgggctgaacatactgaagtgccgcccatcctactgcttttttcaattcatcctgcgtcatgatcgtttcgcctgtggtatgaaatttcacacgcattatatacaaaaaaagcgattcagaccccgttggcaagccgcgtggttaactcatccataaaatatcgcgcaatggcaggcatcccctttcgccccgcaaataaagcatacaacggtctgggtatgccgctccacggtgcaaacaggcgcaccagttcaccgttcgcaagcccctgtttacaggcaaattgaggcaataacgccacgccattcaacacaaccagggcgcgaactcgctgagcgaaatgcattagcgcaaatccctgatcttttaagctgcgcttttaaccacggatacaaatgttacccgccgacggcttcggtatatgcaacctgacacaaaattgtgtcatagtgcaggaaaaagcatttaccaggagcagacaacagcaatgaaacgcccggactacagaacattacaggcactggatgcggtgatacgtgaacgaggatttgagcgcgcggcacaaaagctgtgcattacacaaagtgccgtcagtcagcgcattaagcaactggaaaatatgttcgggcagccgctgttggtgcgtaccgtaccgccgcgcccgacggaacaagggcaaaaactgctggcactgctgcgccaggtggagttgctggaagaagagtggctgggcgatgaacaaaccggtagcactccgctgctgcttagtctggcggtcaacgccgacagtctggcgacgtggttgcttcctgcactggctcctgtgttggctgatagccctatccgcctcaacttgcaggtagaagatgaaacccgcactcaggaacgtctgcgccgcggcgaagtggtcggcgcggtgagtattcaacatcaggcgctgccgagttgtcttgtcgataagcttggtgcgctcgactatctgttcgtcagcagtaaaccctttgccgaaaaatatttccctaacggcgtaacgcgtagcgcattactgaaagcgccagtggtcgcgtttgaccatcttgacgatatgcaccaggcctttttgcagcaaaacttcgatctgcctccaggcagcgtgccctgccatatcgttaattctagtgaagcgttcgtacaacttgctcgccagggcaccacctgctgtatgatcccgcacctgcaaatcgagaaagagctggccagcggtgaactgattgacttaacgcctgggctatttcaacgacggatgctctactggcaccgctttgctcctgaaagccgcatgatgcgtaaagtcactgatgcgttactcgattatggtcacaaagtccttcgtcaggattaatccatcaaataatgcctgatagcacatatcaggcgttgtcctcacttctttttgtattccttgaatcacatcacaaaatagacaaatctcaggcggcaaaaaacgacgtctgaatgcattttttttgctggcgacaaacccacgtaaaaagctcaccgtaggcgcaaataccctcattttgattgcgttttacggagcaaataatgtctaacgtgcaggagtggcaacagcttgccaacaaggaattgagccgtcgggagaaaactgtcgacagcctggttcatcaaaccgcggaagggatcgccatcaagccgctgtataccgaagccgatctcgataatctggaggtgacaggtacccttcctggtttgccgccctacgttcgtggcccgcgtgccactatgtataccgcccaaccgtggaccatccgtcagtatgctggttttagtacagcaaaagagtccaacgctttttatcgccgtaacctggccgccgggcaaaaaggtctttccgttgcgtttgaccttgccacccaccgtggctacgactccgataacccgcgcgtggcgggcgacgtcggcaaagcgggcgtcgctatcgacaccgtggaagatatgaaagtcctgttcgaccagatcccgctggataaaatgagcgttagcatgaccatgaatggcgcagtgctaccagtactggcgttttatatcgtcgccgcagaagagcaaggtgttacacctgataaactgaccggcaccattcaaaacgatattctcaaagagtacctctgccgcaacacctatatttacccaccaaaaccgagtatgcgcattatcgccgacatcatcgcctggtgttccggcaacatgccgcgatttaataccatcagtatcagcggttaccacatgggtgaagcgggtgccaactgcgtgcagcaggtagcatttacgctcgctgatgggattgagtacatcaaagcagcaatctctgccggactgaaaattgatgacttcgctcctcgcctgagcttcttcttcggcatcggcatggatctgtttatgaacgtcgccatgttgcgtgcggcacgttatttatggagcgaagcggtcagtggatttggcgcacaggacccgaaaagtctggcgctgcgtacccactgccagaccagtggctggagcctgactgaacaggatccgtataacaacgttatccgcaccaccattgaagcgctggctgcgacgctgggcggtactcagagtctgcataccaacgcctttgacgaagcgcttggtttgcctaccgatttcagtgcacgcattgcccgcaacacccagatcatcatccaggaagaaagtgaactctgccgcaccgtcgatccactggccggatcctattacattgagagcctgaccgatcaaatcgtcaaacaagccagagctattatccaacagatcgacgaagccggtggcatggcgaaagcgatcgaagcaggtctgccaaaacgaatgatcgaagaggccagtgcgcgcgaacagagcctgatcgaccagggcaagcgtgtcatcgttggtgtcaacaagtacaaactggatcacgaagacgaaaccgatgtacttgagatcgacaacgtgatggtgcgtaacgagcaaattgctagcctggaacgcattcgcgccacccgtgatgatgccgccgtaaccgccgcgttgaacgccctgactcacgccgcacagcataacgaaaacctgctggctgccgctgttaatgccgctcgcgttcgcgccaccctgggtgaaatttccgatgcgctggaagtcgctttcgaccgttatctggtgccaagccagtgtgttaccggcgtgattgcgcaaagctatcatcagtctgagaaaagcgcctccgagttcgatgccattgttgcgcaaacggagcagttccttgccgacaatggtcgtcgcccgcgcattctgatcgctaagatgggccaggatggacacgatcgcggcgcgaaagtgatcgccagcgcctattccgatctcggtttcgacgtagatttaagcccgatgttctctacacctgaagagatcgcccgcctggccgtagaaaacgacgttcacgtagtgggcgcatccagtctggctgccggtcataaaacgctgatcccggaactggtcgaagcgctgaaaaaatggggacgcgaagatatctgcgtggtcgcgggtggcgtcattccgccgcaggattacgccttcctgcaagagcgcggcgtggcggcgatttatggtccaggtacacctatgctcgacagtgtgcgcgacgtactgaatctgataagccagcatcatgattaatgaagccacgctggcagaaagtattcgccgcttacgtcagggtgagcgtgccacactcgcccaggccatgacgctggtggaaagccgtcacccgcgtcatcaggcactaagtacgcagctgcttgatgccattatgccgtactgcggtaacaccctgcgactgggcgttaccggcacccccggcgcggggaaaagtacctttcttgaggcctttggcatgttgttgattcgagagggattaaaggtcgcggttattgcggtcgatcccagcagcccggtcactggcggtagcattctcggggataaaacccgcatgaatgacctggcgcgtgccgaagcggcgtttattcgcccggtaccatcctccggtcatctgggcggtgccagtcagcgagcgcgggaattaatgctgttatgcgaagcagcgggttatgacgtagtgattgtcgaaacggttggcgtcgggcagagcgaaacagaagtcgcccgcatggtggactgttttatcagcttgcaaattgccggtggcggcgatgatctgcagggcattaaaaaagggctgatggaagtggctgatctgatcgttatcaacaaagacgatggcgataaccataccaatgtcgccattgcccggcatatgtacgagagtgccctgcatattctgcgacgtaaatacgacgaatggcagccacgggttctgacttgtagcgcactggaaaaacgtggaatcgatgagatctggcacgccatcatcgacttcaaaaccgcgctaactgccagtggtcgtttacaacaagtgcggcaacaacaaagcgtggaatggctgcgtaagcagaccgaagaagaagtactgaatcacctgttcgcgaatgaagatttcgatcgctattaccgccagacgcttttagcggtcaaaaacaatacgctcagtccgcgcaccggcctgcggcagctcagtgaatttatccagacgcaatattttgattaaaggaatttttatgtcttatcagtatgttaacgttgtcactatcaacaaagtggcggtcattgagtttaactatggccgaaaacttaatgccttaagtaaagtctttattgatgatcttatgcaggcgttaagcgatctcaaccggccggaaattcgctgtatcattttgcgcgcaccgagtggatccaaagtcttctccgcaggtcacgatattcacgaactgccgtctggcggtcgcgatccgctctcctatgatgatccattgcgtcaaatcacccgcatgatccaaaaattcccgaaaccgatcattagcatggtggaaggtagtgtttggggtggcgcatttgaaatgatcatgagttccgatctgatcatcgccgccagtaccagtaccttcagtatgacgcctgtaaacctcggcgtcccgtataacctggtcggcattcacaacctgacccgcgacgcgggcttccacattgtcaaagagctgatttttaccgctagcccaatcaccgcccagcgcgcgctggctgtcggcatcctcaaccatgttgtggaagtggaagaactggaagatttcaccttacaaatggcgcaccacatctctgagaaagcgccgttagccattgccgttatcaaagaagagctgcgtgtactgggcgaagcacacaccatgaactccgatgaatttgaacgtattcaggggatgcgccgcgcggtgtatgacagcgaagattaccaggaagggatgaacgctttcctcgaaaaacgtaaacctaatttcgttggtcattaatccctgcgaacgaaggagtaaaaatggaaactcagtggacaaggatgaccgccaatgaagcggcagaaattatccagcataacgacatggtggcatttagcggctttaccccggcgggtagcccgaaagccctacccaccgcgattgcccgcagagctaacgaacagcatgaggccaaaaagccgtatcaaattcgccttctgacgggtgcgagtatcagcgccgccgctgacgatgtactttctgacgccgatgctgtttcctggcgtgcgccatatcaaacaagctccggtttacgtaaaaagatcaatcagggcgcggtgagtttcgttgacctgcatttgagcgaagtggcgcaaatggtcaattacggtttcttcggcgacattgatgttgccgtcattgaagcaagcgcactggcaccggatggtcgagtctggttaaccagcgggatcggtaatgcgccgacctggctgctgcgggcgaagaaagtgatcattgaactcaatcactatcacgatccgcgcgttgcagaactggcggatattgtgattcctggcgcgccaccgcggcgcaatagcgtgagcatcttccatgcaatggatcgcgtcggtacccgctatgtgcaaatcgatccgaaaaagattgtcgccgtcgtggaaaccaacttgcccgacgccggtaatatgctggataagcaaaatcccatgtgccagcagattgccgataacgtggtcacgttcttattgcaggaaatggcgcatgggcgtattccgccggaatttctgccgctgcaaagtggcgtgggcaatatcaataatgcggtaatggcgcgtctgggggaaaacccggtaattcctccgtttatgatgtatagcgaagtgctacaggaaagcgtggtgcatttactggaaaccggcaaaatcagcggggccagcgcctccagcctgacaatcagcgccgattccctgcgcaagatttacgacaatatggattactttgccagccgcattgtgttgcgtccgcaggagatttccaataacccggaaatcatccgtcgtctgggcgtcatcgctctgaacgtcggcctggagtttgatatttacgggcatgccaacagtacacacgtagccggggtcgatctgatgaacggcatcggcggcagcggtgattttgaacgcaacgcgtatctgagcatctttatggccccgagcattgctaaagaaggcaagatcagtaccgtcgtgccaatgtgcagccatgttgatcacagcgaacacagcgtcaaagtgatcatcaccgaacaagggatcgccgatctgcgcggtctttccccgcttcaacgcgcccgcactatcattgataattgtgcacatcctatgtatcgggattatctgcatcgctatctggaaaatgcgcctggcggacatattcaccacgatcttagccacgtcttcgacttacaccgtaatttaattgcaaccggcagcatgctgggttaatgactcgtcccgtcacgatcttcagcaatatgctgaagcatcgtggcggtataacgatgatttctgatactataaagatattcctgcatatacatcggcctgtgcggtgcatcaaaatatttcagcgttgccggattcaccagtcgccaggcaaaatgcgggatcaccgtcagaaaatgtccgcgctccacggcgctgattttggccataaaactgtagggacgataaataatggttggattgatcccacaaggtcgcatattcgcatcaatcattgcttcgaagttggcccggttctgaaagcgcatttgtagccagggcagctcctgaagcagctcttgctcttgtcgctcttcataacggcgagaaacgagaaagcctaatcgcagcggtggtagttcactgatagtcaggttttccagttcctgaactcgtgcagatacatgctgtggggagataataaaatctaactggcggtcaaaaagattatcgataacgccattttcgctgaactcaactggctgggcggtcacgccttcatacttatctccgagactaatcaactgatcgaaaataattgtcggataagtattatctatgccaatcacaatttctcgactacgacgcccactgttatggatttcattatcaatcgcagaaagccgttgataaaccgggaacagtttttgatacagttcctgtccggctttattgaggctgatattattatctttgcgggtaaatagcgtatagccaatttgttcttccagcgcggcaatgcttttaccaaatgggctagccgtcatatggattttttctgccgcccgggcaatattattggtttgcgctaataaaatgaaattgcgcatctttttgctaataaaaatgtccatccccctcccccgcatccttgtccgcttaaccgtttcagtcagcctatccttgatgaaaccgcgagcaaagataggtgattacgtcatggttttacagaaaattacagaaaaaggaggcaatatcgggtaaaggcattagcccgacgaatacgtcgggctacaaatattattgtgctgcaggtgttttagcgggttgttgatccacaggttctaactggaagaccacatcgacctgatcatcaaactgaatagcggcctgctcgtaagtttcctgggcggacaccggcgcggcatcggctttcatcatccgcaccattgggctgggctgatagttggaaacatggtagcgcacgctatataccggccccagtttacgatgaaagccgttcgccagttcctgcgcctgatgaatcgcgttatcaatcgctgccttacgcgctttgtctttataggcatccggctgcgccacgcccaggctcacagaacgaatttcgttaagacccgccttcagcgcgccatccagcaaggaattcagtttgtctaactgacggagcgtgacttccaccgttctcacagcgcggtagcctttaaggatacttttaccatcctgataatcataatctggctgggtgcgtaagttcgcactgctgatatcttttttcgcgatctgattgagttcaaggaaggaaatgtattgtgcgacgcgctcatctgcctgtttcttggcagtagcggcatccttcgcggccacgttaacttcaatcgcaagagtggcaatgtctggcaccgcatccacgcttgccgtaccggaggtgacaatatgcggtccatccggcaattcgttagcctgcgctgccatcccgctaatacccattaatgccgccagggcgataactttgaacttcacgttagtctctccgtgttaattgacttgcccaaaattcaggacctctggaggcaagcttagcgcctctgttttatttttccatcagatagcgcttaactgaacaaggcttgtgcatgagcaataccgtctctcgccagctgcaaggcaataaaccacataacacatcccacaaccagattgataatgcgctgtgcttttgccgtgcgcagacgcggtgccagccaggctgcgagaagagccagaccaaagaaccacaggaaagaggcgctaattgtcccgagtgcaaaccagcgttttggttccacatcaagttgcccgccaaggctgcccagtacaacaaaagtatccaggtaaacatgcggattcagccaggtcactgccaacatggtggcgataattttccatctgccttgcttcatgacttcggcgctggctaactcaatattactgctcattgctgttttaaaagcgccaaaaccataccacagcaagaaggctacgccgccccaggtgaccagcgccagcaaccacgggctctgcatcaataacgcgctgccaccaaaaatcccggcgcaaatcaggaccaaatcgctgatagcacaaagtaaggcaatcataatgtggtactgacgacgtatgccctgattcatcacaaaagcattttgtggaccgagcggtaggatcatagccgccccaagtgcaagaccttgaaagtaataagaaaacacgttggatattccgaattaagtatctgatgcagagactatatcgcgggattgttattagcggaaattgataatattaattggcaatcagaaaaactaataagagagaggccagagagtattatctggcctcagcgttgattacgcagctttgtcttctttcacccgcttaaagttcacatccatttgcgggtacgggaagctgataccggcggcatcaaattcacgtttaatacgctccagcacatcccagtacacgttttgcagatcgccgctgttgctccagacgcggaccacgaaattaatgctgcttgcaccaagttcgttcaggcgcacagtcatttcgcgatctttcaaaatgcgatcttcagactggataatattggtcaggatctgcttaacctgatcgatatcggaatcatacgccacgccaataataaattcgttacggcgaactggctcgcgggagaagttaataatatttccggcaataattttaccgttcggaataacgataattttaccgtctgcagtacgcatggtggtggagaaaatctgcacactcagcacagtaccggctacgccgcccaggtcaacatattctccggcacggaacgggcggaacatgacaagtaacacgccagcggccaggttagacagactcccctgcaaagccagaccaacagctaagcctgcggcaccgagtacagcaatgacactcgcggtttgtacacccacgcgtcccagtgcagcgattagcgtaaaggcgataataccgtaacggactaatgcagaaagaaaatcagcaacagtggcatcgattttacgggagatcatcaggcgattcaccgcgttggaaatcatccgcgcgataatcaaaccaacgatgatgatcgcgagtgccgccacgatgtttactgcataacttagcagcagcgcctggttagctaccagccagcttcccgcgccgtttatgctatcgacaacattcaaatcttccattcaatattccttttcaactgactcaaaatggagaaatacactccgccgccttatgacgggcagtctgacaagggtaaacaataaagcataattttgccaaatagatcacagatttctcatctgaatcaccttgcttttggcgaaaaaatccccgcagagcggggctcagacagatatcaatgtgcgctttgtcatgccggatgcggcgtgaacgccttatccggcctacaaaaacctgcaaattcaatatattgcaggatacgtgtaggcctgataagcgtagcgcatcaggcaattttgcttttggcgaaaaaaagacccgcagagcgggccttgagataagcagaaaggaatatcttacagaacgtcgatcgcgttcagttcctggaatgctttctccagacgagcgatcatgctagtctgaccggcacgcagccatacgcgcggatcgtagtatttcttgttcggctgatcttcgcctttcgggttacccagctgaccctgcagataagcttcgttcgctttgtagtagttcagaacgccttcccaggttgcccattgggtatcggtatcgatgttcatttttactacgccgtagcttacggagtctttgatttcctgagcagtagaaccggaaccaccgtggaatacgaagttcaggctgttgtgcggcaggttgtgtttcttggaaacatattcctgagaatcacgcaggatggtcggagtcagaaccacgttacccggcttgtaaacaccgtgtacgttaccgaaggacgctgcgatggtgaaacgcgggctgattttgctcagttcggtgtatgcgtaatcaacgtcttccggctgggtgtacagtgcagaagcgtccatgtggctgttgtccacgccgtcttcttcaccaccggtgcaacccagttcgatttccagagtcatgccgattttggacatgcgctccaggtatttagagcagatttcgatgttctcttgcagagattcttcagacaggtcgatcatgtgagaagagaacagcggcttaccggtagctgcgaagtgtttttcacccgcgtccaacagaccgtcgatccacggcagcagtttcttcgcgcagtggtcagtgtgcaggataaccggaacaccataatgttcagccatctggtgaacgtgatgcgcaccagagatcgcgcccaggatagcagcaccctgcggaacgtcagatttcacgcctttaccagcgataaaggaagcaccaccgttggagaactgaacgataaccggcgctttaactttagcagcggtttccagtacggcgttgatggagtcagtaccgacgcagtttactgctggcagtgcgaagttgttttcttttgctacctggaaaactttctgtacgtcatcaccagtgattacgccaggttttacgaaatcaaaaatcttagacatgtctcttgtcctgtatcgtcgggccttatactcgtcatacttcaagttgcatgtgctgcgtctgcgttcgctcaccccagtcacttacttatgtaagctcctggggattcactctcttgtcgccttcctgcaactcgaattatttagagtatgaaaaattgcgtgctctaaaagcgcgctgaaacaagggcaggtttccctgccctgtgattttttacttcttagcgcgctcttcgagcatcgctactgcaggcagtactttaccttccacgaattcgaggaatgcgccgccgccagtggagatgtaggagattttgtcagcaatgccgaacaggtcgattgctgccagagtgtcgccgccgccagcgatggagaacgcttcgctgtctgcgatagcgttagccacgatttcagtacctttgcggaagttcgggaattcgaacacgccaaccggaccgttccacagaatggttttcgcattcttcaggatttcagccagttcctgagcggaagcatcaccgatatccaggatctgctcgtcagctttcacatcgttaacagatttcagggtagccggtgcagtttcagagaactcggttgctacgcgaacatcagacggaaccgggatgttgcaggtggtcagcagacgtttagcttcgtcaaccaggtcagcttcgtacagggatttacccacatcgtggccttgtgccgcgataaaggtgttagcgataccaccaccaacaatcagctggtcagcgattttagacagggagtccagaacggtcagtttggtagatactttagaaccaccaacgatagccaccatcgggcgagcaggttctttcagtgctttacccagcgcgtccagttcagctgccagcagcgggcctgcgcacgcaacgtcagcgaatttaccgataccgtgagtagaagcctgcgcgcggtgagcagtaccgaatgcgtccattacgaacacgtcacacagtgcagcgtattttttggacagggtttcgtcgtctttcttctcgcctttgttgaagcgaacgttttccagaacaaccagttcaccttcagcaacgtcaacgccgtcgaggtaatctttaaccagacgaaccgggttagacagtttgtctttcaggtagttaacaaccggcagcagagagaattcttcgttgtactcgccttcggtaggacgacccaggtgggaagttaccatcacttttgcgccttgtttcagggccagttcgatggtcggcagagaagcacggatacgcgcgtcgctggttactttcccgtcttttactggtacgttcagatccgcacggataaatacacgtttcccagcaagatccagatcggtcatcttaattacagacatggtgaatcctctcgttgattctaaaagttttgcagacgctgcttgcgtcttacctgaaagcaacagtagccatagctaacgtcgtgtcgagcattcggttagcaaagccccattcgttatcgcaccagaccaacgttttgatcaggtgtgcgccactgacccgggtttgggtgccatcgacaatggcactgtgcggatcgtggttaaaatctacagagaccaacggcaattccgtatagtcaactataccatgaaatgcaccttgtgctgctttttgcagcaacaggttgacttcattggcttttacaggtttcttcaccgtcacgcttaaatcgattgccgtcacatttatggttggcacacgtaccgcaatcgcttcaaagcgatcgttaaattgcggaaaaaatcgtgtgataccggcggccagtttagtatcgaccggaatgatgctctggctggctgcccgggtgcgacgcaggtcaggatggtatgcatcaataacctgttgatcgtgcatggcggagtgaattgtggtcacagtgccggactcaataccgtacgcatcatctaacaatttgatgacgggaattatgcaattcgtggtacaggaagcgttagaaacgatgcggtgttccgcacgaagttgatcctgattgacgccgtaaacaacggtcgcgtcgagatcgttactgccaggatgactaaagagcacttttttggccccggcggcaatatgcgcttcgccatgctcgcgggagccatatacgccggtgcagtcgaggactacatcaacgccaagttcacgccaggggaggctttgcagactacgttcatgcaatacgcggatggcgtcatcaccaacaaaaagttgatcgcgttcctgtcgtacttcccatgcaaaacggccatggctggtgtcatatttcaacaaatgcgccatgcccgcagcatccgccagttcgttgattgccaccacggtaatttccgcccggcgtccggattcatacaaagcacgaaccacattacgcccgatgcgaccgaagccatttatcgctacgcgtacggtcatagatctcctgcaaggttttccctgagcaaatttgccagacagagtaatccagcaaatcgtccggggaaaccttacctgtcgcaaactgcgactgattggttaattgtcgaacatttaatcgactgaaacgcttcagctaggataagcgaaacgtggaataaaaggaatgtttgtccagccgaagaagacatttatctgactcacatcacacttttatccccttttgtgggaagctttattccaggctggcgtaataataaccctacaataactggaataaattgtcagcttgtgaagtgataccggccttcttcagtcatctctactatcagattggcctgacggctattcatcagcacacgctcgacattggggccatcggtgcgggcataaaatgcttcggctacttgccgcgttaatcctcccgcaattttacgactaatcaagcgctcccgcagaatttgagcaggtgcatgaataaaaatagaaaaatcgcagaaagatgccaactccagccacttttcatcatccagtaacaaccagtttccttcgacgatgacgagtggtgcggtaacgtgcaacgcatcttcaacaggatcatgcttttgtcgatcgtactgcggccacgtacaatccccttccacgacctggcgcagattttccgtcagtttcgcaacgtcaaatgtctctggtgcgcctttgaaggggcgcaattgatgcgcatccagccagctattgtaatggtgaaaaccatccatcgggagcgtctgaatagcgggcagttccgggtcttgttgcgcgagatattcccagaaggtggttagggtacttttacccgtccccggcggagcgcaaagaaaaaccaccgtacgccgctgcggatttaccgtctgtaaggccgccaacatgtgcagcaacggtttatgtacattttcaatctcttcgttctggtactgtgcctgtatcttcagcccattcaccgttaattcaattttcacggcgttaattcctttaaggtggtcgttactgccagcgtcagcgccgttttgaccattccgctaaaacgcgcctcactccagacggagaaatcagcgaacttcatcgcttttaacgcgtcatagagcatcgcattgcgggttatgctattgacgttgctgataaaatcccaggtcatgtcatcggcaaatccgggcgtttcatcctgttcgttcaggtaatgccagaactgggaaaaatgcgtgatatcggcgtacaaccatttatccattttcccaacgcataaatcaaacgcagtgcaacatcaatatcgtcaagcgggccgctttgggcgagtaacggcttcactgcatattccacgatctcttcatcgttatcgacaaacaggctcggcagaaactggcgtatcccctggagcaaaatggtatgcgcagttttcataaaactaaataaattgtcctgtgcatccagttgctcaagcacatcatcttctgtcagcgtcgccattggtcttccgatagatcaccatcaatgcagggagtctattatattacacgtttggtccgcgccgccgatcagtaatgtctgcgtccgcaccccattcgccgtctgttggataccgttcaccagctcaccgcccgtcacgcccgtagcgctaaagaggatatcgttccccctcaccagttcatcgaggctgtacacacggttaacgtcaacgcccattgccttgcaacgcttgcgctcctgctctgcaatctgccgattttccgtgtaatcccctttagcctggcaaaagtcaatcagctcggcctgcatatccccgcctaatgctttaacggcacaggcagaaatcacgccttctggcgcaccgccgatggtgtacatcacatcgtaaggattatcctgccagcaggtcagcacgctggcggcgacatcgccatccggcagggcaaaaaccttcacgcccagctgtgttgcttcctcaatcgcggcactcaggcgcggtttatccagcgtaaccatgcgcagcttatccagcggtttgcctaacgctttcgccacgttgcgcaggttgtccgtcagaggcaaagacagatcaatcgcgcccgccgccagccgattaacaaccagctttttcatatacatatcgggcgcatgtaacaggctatctcgaggggcgaaagccatgaccgccagcgcattgctctgccccatcgccaccatccgcgtgccttcaatgggatcaaccgcgatatcgacttctggcccatcgcctttgcccacctcttcgccaatccacagcatcggcgcatggtcaatttctccttcgccgataaccactcgtccacgaaaagcgacgtcgtttaatgcctggcgcatcgcggtgaccgccaggccatcaattttatttttgtcgccacatccggtttgcggccaggcagccaacgctgcctgttccgtaacgcgaaataatggccacgccagggacatcattgcgcggcctccccgatatcaacgccaaattgtgccagcagatatttctcggcctgttcattccagatgccgtgcgtttcctcaaccagccgcgccaactctttaaacagcggatcggttttgcctttttcggcaaaatcggcaatggcagtgagcggcatggtcacgccgttataaatgagttttttaccgccagggatatccggcagattgagcacggtttctggcaccgcatccaggccaccgatatgggtcaccataaagctcggctgtaactgcccagtggcgctaagggcaatcgcctctttcatgtcgtccgtactaccgccagatgtaccgacgacgtgcgtgctgttgtaatggacgttgtagaaattaaacggcactttgaagtttttatccgtcggcccggcaaagaagttcagacagccatcttccgccagtaattcatcagccatctcaacgacagcaggcaccgccgcataaacaaaaatgtcatcgaacccggcatctcctgtcagcgcccgcagcatctggacaggatcgctcatccctttggtattcacatacaccagctcaatgcctttactggccgccagttccaccggcagcagcttctgtacctgcgccagacgtttgtcgtcgatatcgaccaccaccacccggctcggttgtatgccgccgttaatggcgtaatcgatagcgccaatgcccatcggacctgcacacgccagcagtgcaatattgccgccaggtttgacgcccatgcgatgctcataaacatattgcgtggtgtgataattggcatgataagcaccaataatgcagcacataggctctgccaggctcgccgcagcaaaataagagccgtgatacggtaatacgcagcccaaattaatggcgatttcgggaataatcatataagtggcattgccgccaaaatattcgtagctgtagcccgcactatatccgcttggtaaccccatcgccggttgcaatacaaaacgctggccttttttatatttgccagtgagatttttacccacttcgacaataaccccggcacattcatgcccggtaatgaccggatgattttctaaatcgtcgggtacgcgtttatgttcactaccgagtaacgccgctttccaggtgcttaaacagacgctgtcagaaattacactcaccagtaattcattatcggtaatttctggcagttcaaatacgcgcagacggacatcccgcttgccataaatagcagcaactttggttttcatttttacctctgtaatcagtgtttatgttcggcggttaattgattaaataaagtgtcgagttttggatcgccaatatagttattaatcaatatcagtggtttatccgtcacacgtttcacgcgcccttccagactggcatgagtaacgacgatatccgcatccgcaggcacgttttctatggcgtaatgttttacttcaattgccagccccgctttttccaggcgtttacggaaggtggtcgcgcccatcgcactggagcccatccccgcatcgcaaacaaaggcgatacgcttaaccctgcttaagctgaatgcaccctcttgtttcatcgccttaaccgcattggcactctgagcaaactcatcttcgctctccgtttccaccgttttttccatcttcagtatcaggctagtaatagcaaaggacaccagggtacctaccgtaacaccggcaattgtcgccaggaagctgcctttcggcgtcagtgccaggtaagcaaagatagaccccggacttgggccagccaccagaccaccgtccagtaagttaaacatccaggtgccagacataccgcccgcaatcatggcaataatggtcagcggcttcatcagcacatacgggaaatacagttcgtggatcccaccgaggaagtgaataatcatcgccccgggcgcagaacgtttactcatccctttaccaaacaaggtaaacgccagcagcagccccaggcccggacctgggttagaggccaccataaagaagatggatttaccgttaacgctagcctgttgcattcccagcggataatagacgccctgatcgatcgcattattgaggaaaagcactttcgccggttcattgatgacactcaacaatggcagataacccgcatgtaccagcgcctcaatacactctttgacgaaagtattggcaattaacaccgccgggccgataacttcaaaacccagcagacaaaggagcatccccgcgatacctaaactgaagttattgataaccatctcaaaaccggcaggtatgcgtttttccagtgccttatcgacatattttatgaccaacccaccgagcggccccatgatcatactgccaaggaacatcgggatctctgcgccaacgatcacaccaatagtacctattccgcccatgaccgccccgcgtttaccgccgaccagatgaccacctgtagaaccaatcatcacgggcaataaataggtaatcatcgggccgacaattttggcgaaatgttcgttaggcagccaaccggtgggaataaataacgcagtaataaaaccccaggcaataaaagcaccaatattggggatgaccattgcagtcaaaaagcccccaaaagcctggacctttgcacgagcagacttgttttccataatattatcctgtagaggagagagtaattatccgcggctgataatgtccgctaattgtttttcactacttgctgttaagagttgttcgagtatttcttcttcgcacagtaattcacttaacgcctgaatagcgccaatgtggctatcggcatcggcagcagagagtccgatgagtaatttaattggttcgtcattccccggaaaataaacaccttgttcaagtaatgtcaaagacatcccggttttaagcgccccacattccggtcgcgcatgaggcattgccacgcctggtgcgagaatataataagggccattgttaatggtggaatctttaattgcctgaatgtaattctcgctgatatagtttttatccagcaaacttaccatgctgaaatcgatagcttcctgccaatcttttgcactatgtataacactgatactactttctggaaaataatcactaagccgcataaattatccttattttatttttagggtaccgtccggcggtaaaaataaaatactcgtgcggtttaatgaaagcaattgagcagggaaaccggtgttttgaaaacagtgaattattaatttcttatataacattgagttatagatataacaacaaatgtcaatacgcatatcgtgatgcatattacataattgatatttattgcatataaatatttgtgatctacaacacgccttatctattgcttgtccgcaaacggacatatcaaggtaataaaaaaggtcgccgaagcgacctttttacccgaaatgctaattacagcagttcttttgctttcgcaacaacgttatcaacagtgaagccgaactcttcaaacagcagctctgccggagcagattcaccgaaggtggtcataccgacgatagcaccgttcaggccaacatacttgtaccagtagtcagcaatacccgcttctacagcaacgcgtgcagtaaccgctttcggcagtacggattcacggtaagcagcatcctgcttgtcaaatgcgtcggtagacggcatggacaccacgcgcgctttcacgccttcggcagtcagtttttcgtaggcagcaacagccagttcaacttcactaccggtagcgatgaaaatcagttccggctgaccggcgcagtctttcagcacataaccaccgcgcgcgatgtttgccagttgctcttcagttcgttcctgctgcgccaggttctgacgggagaggatcagtgcggtcgggccgtcctgacgctcaacaccgtatttccacgcgaccgcggattcaacctggtcacacggacgccatgtagacatgttcggggttacgcgcagagaagcgacctgctcaaccggctggtgagtcgggccgtcttcgcccagaccgatggagtcgtgggtgtaaaccatcacctgacgctgtctcatcagcgcagccatacgtacggcgttacgtgcgtattccacgaacatcaggaaggtggaggtgtacggcaggaagccaccgtgcagggagataccgttagcaatcgcggtcataccgaactcgcgaacaccgtagtggatgtagttacccgcagcatcttcgttgattgctttagaaccagaccacagggtcaggttagacggcgccaggtcagcagaaccgccgaggaattccggcaacagcggaccgaacgcttcgatagcattctgagacgctttacggctggcgattttcgccggattagcctgcagtttagcgatgaactctttcgctttagcgtcgaagtcagacggcatttcgcctttcatacggcgggtaaattcagcggcttcctgcggataagctttcgcgtaagcagcgaatttctcgttccatgcggattctttcgcctggcctgcttctttcgcatcccactgagcatagatttcagacgggatttcgaacggcgcatatttccagcccagttgttcgcgggtcagggcaatttcagcgtcgcccagcggcgcaccgtgggagtcgtgggtaccggctttgttcggggaaccgaaaccgatgatggttttgcacatcagcagggaaggtttgtcagtcactgcgcgcgcttcttctactgcgcgtttgatagatgccgcgtcatgaccgtcgatgtcgcgaataacgtgccagccgtaagcttcgaaacgcattgcggtgtcgtcggtgaaccagccttcaacgtgaccatcgatagaaataccgttgtcatcgtagaatgcaatcagtttacccagcttcagcgtacccgccagagagcaaacttcgtgggagatgccttccatcatgcagccgtcgcccatgaaggcgtaggtgtagtggtcgacaatgtcgtggcccggacggttaaactgcgccgccagcgttttttctgcaatcgccataccgactgcgttggcaataccctgacccagcggaccggtggtggtttccacaccagcggtgtaacccacttccgggtgacccggagttttagagtgcagctgacggaagtttttcagttcttccatcggcagatcgtaaccggtgaggtgcagcaggctgtagatcagcatggagccgtggccgttggacagcacgaagcggtcacggtcagcccaggacggattctgcgggttgtgtttcaggaaatcacgccacaggacttcggcaatgtcagccatacccataggggcacccgggtgaccggatttggctttctgtactgcgtccatgctcagcgcacgaatagcattggcaagctctttacgactggacattttgactccagatcggatgatgaagggcacgcccttaacgacttgacgacagcgcgttttgggctacgccggaaaatttgccaacaatttaccacaagccgcgcgtcatgtacatggaacatccttttgccgcttcagaaatctctggatcatgctcgcatgttgcgcaatctactcgcccgtccgctgcgcttttccttatactgagactgagcgtcgattcacctgcaaacggcgcatttttagaataatcctgaccttgtgcggaagagaaaacatgaaaattcgcgccttattggtagcaatgagcgtggcaacggtactgactggttgccagaatatggactccaacggactgctcagtagtggagcggaagcttttcaggcttacagtttgagtgatgcgcaggtgaaaaccctgagcgatcaggcatgtcaggagatggacagcaaggcgacgattgcgccagccaatagcgaatacgctaaacgtctgacaactattgccaatgcgctaggcaacaatatcaacggtcagccggtaaattacaaagtgtatatggcgaaggatgtgaacgcctttgcaatggctaacggctgtatccgcgtctatagcgggctgatggatatgatgacggataacgaagtcgaagcggtgatcggtcacgaaatggggcacgtggcgttaggccatgtgaaaaaaggaatgcaggtggcacttggtacaaatgccgtgcgagtagctgcggcctctgcgggcgggattgtcggaagtttatctcaaagtcaacttggtaatctgggcgagaaattagtcaatagccaattctcccagcgccaggaagcagaagccgatgattattcttacgatcttctgcgccaacgcggcatcagcccggcaggtcttgccaccagctttgaaaaactggcaaaactggaagaaggtcgccaaagcagtatgtttgacgaccatcctgcatccgccgaacgcgcccagcatattcgcgatcgcatgagcgcggatgggattaagtaaagcctggtggtgtcgaacgtaggtcagataaggcgttcacgccgcatctgacatgaatggcacatttgttaccttgtgcgcattgccggatgcgatgctggcgcatcttatccggcctacgggtgccgaacgtaggtcggataaggcgttcacgccgcatccgacattaatggcacgttttacccgtgcgcatcgcatctggtgcttactcgccctttttcgccgcctgaatatacagcatttccagcgccagcgttgccgctgccagagcagtgatttcgctctgatcgtatgccggagccacttccactacgtccatcccaacaatgttgagatctttcaggccgcgtaccagtttaatagcgcgatcggaggtcaggccgccaatcactggcgtaccggtgcctggtgcaaaagcaggatccaggcagtcgatatcaaaagtcaggtaaaccggcatatcacccacaatctgtttcacttgggcgataacgtcatccacgctgcgatcgttcacctggcaggcgtccagcacggtaaagccgttgtctttatcaaactcggtacgaataccaatctgcacggaatgattcgggtcgatcagaccttctttcggcgcggtatagaacatagtgccgtggtcaaattcacaaccgttcgcataggtatcggtgtgggcgtcaaagtgtaccagcgccattttgccgaaatgcttcgcatgagcacgcagcagcggcagcgtaacaaagtggtcaccaccgaaagagagcatacgcttaccggcagccagcagcttctcggcgtgcgcctgcagcttttcgctcatctcacgggcatcgccaaaggcatataccagatcgccgcagtccacgacgttcagacgctcacgcatgtcgaaattccacgggaagcggttgtgttcccaggccagattcgtgctaacctgacggatcgctgccggaccgtggcgaccacccgcacgaccagaagtggccatatcgaacggcacgccagtaatcacccagtctgcatcgctgtcatacggctggaagttcatcggcaggcgtaaaaaaccaaaggcattggaaaccagactgttatcgtattgatgacctaaggtgctcatggatggactcctattacaaagtcgatataaaaaaacccttccgcgtcgttaggcccgacgaggaagggttggatttgtcacaataaattgtggcggattatcaccgctaaattaagcggattcaagtaacacaggacttactcatcttcaagataagtataaccgtacaaacctgcctcgaactcttcaaggaactgttgttgcagttcagcatcaagatcggttttcttcacttgatcgcggaactgggttaacagcgttttcggatcgagctgtacatattgcagcatgtccgccacggtatcgccttcgtcagacagttctacttctacgctaccgtcagggaagacgaacacgtcaaccgcttcggtatcaccgaacaggttgtgcatgttgccgaggatctcctgatatgcgccgaccataaagaaaccgagcatcggcggattctctggatcgtactccggcattggcattgtcgtggcaataccgtcaccatcaatatagtggtcgatagcaccgtcagagtcacaggtaatatccagcagcacagcgcgacgttccggcacttgatccagcccttccagcggcagaaccgggaacaactggtcgatcccccatgcgtccggcatgctctggaacaggctgaagttgacgtacattttgtccgccatacgttcctgcagctcgtcgataatcggacgatgagcacggttttgcggatccagctgcttttgcacttcatggcacatgctcaaataaagctgctcagcccatgcacgttcttgcaggctaaagatgccggaagagtagccgatatgaatgtcgtgcagatccatctgactgtcgtgtaaccattcacgcagagaacggcgagttcccggttcgtgcatctcctgccaggtttcccacatgctttgcagcgcgcgcggcgcatcttctgcaggcgcggtcggcaccgtgtattcgttacgttccacgccgatgatattagacaccagcacggtgtgatgcgcagtcaccgcacgaccgctttcggtgattaccgtcggatgcggcagaccgttttcttcacacgcatcgccaatcgcccagataatgttgttggcgtattcattgaggccgtagttcacgctacagtcggactggctacgagtaccttcataatccacgcccagaccgccgccgacgtcgaagcactgaatattgacgcccagcttgtgcagttccacatagaaacgcgcggattcacgaacgcctgtcgcgatatcgcgaatattcgccatctggctaccgaggtggaagtgcagtagttgcaggctgtcgagacgcccggcttcacgcagggtttcaaccagttgcagtacctgagtcgcagccaggccgaacttgcttttttccccgccggaggactgccatttaccgctaccctggctagccagacgtgcacgcacgcccagacgaggaacgacattcagacgttctgcttcatccagcacaatggcgatttcactcatcttctcaatgaccagatagaccttgtgccccatcttctcgccaattaatgccaggcggatatattcgcggtctttataaccgttgcagacgatgacgctacgggtcatgccagcatgtgccagtactgccatcaactcggctttggaaccggcttccagacccagcggttcgccgctatgaatcagggactcaatcacgcggcggtgctggttaactttgatcggataaacaaggaagtaatcgccgttatagccgtaggattccctcgcacgtttgaacgcggcgttaatggaacgcaaacggtgctgcaggatctgtgggaaacagaacagtgcaggcagacgctggccctgtgcttcacgagttttcactaactgcgcgagatcgacgcgagcttccgggacgtccgggtccgggcacacgctaatgtggcccagctcgttaacgtcatagtagttattgccccaccaggcaatattgtaagtacgcagcatcttgctggcttcctgggagctcattgcaacctcctgcatggagcgtagtacaccgtgttcgcccgcactgctaggcaaacccatagacatgtcgtcagacatagcgaacctcaaattattttattaagtgtaaaacagttaacgactatcgcagcctggaactggcttaacaacccataagcacatggattttccagcagactatgctgacgctccaactgcgcaaccggtttctttttcataacattattaagcacataaccgaacgtaagtgtgaaagttcggcgaaaccacgagaaaactcttgtttttacaagagcgcccttgttcagtcctcagtaactgtaaccagctcttgaatcctgagaagcgccgagatgggtatagcaagcgcaggtatgcaaagcagagatgcagagtgcggggaacgaatcttcaccagaacggtgagacaggttaagcagcagacaacggttcattatttcgtaagtcctccacggccgcctgttaagacgaacccacaagccaaaactctgattagtacccggctggaagtggcaacacgaaagaaacgtcgtgtgctttttatttaagccgcgcgccgcgttttataccccacaatggcagaaaattgcaaaagataaatacgcagaatgccggcattgtcaggaaaaatttccagccacgtttttaacagaatgagacagctttcaaaaaaaagtggaaatagggtgaagaattgacctaaaatagccatccagatgttaatccatccataccgattaacactcagactgccagtgtttttaacctgcagagtcgtggtaggatccgctaccacagaaaatccacacaacagtttgagctaaccaaattctctttaggtgatattaaatatggcaaaacacctttttacgtccgagtccgtctctgaagggcatcctgacaaaattgctgaccaaatttctgatgccgttttagacgcgatcctcgaacaggatccgaaagcacgcgttgcttgcgaaacctacgtaaaaaccggcatggttttagttggcggcgaaatcaccaccagcgcctgggtagacatcgaagagatcacccgtaacaccgttcgcgaaattggctatgtgcattccgacatgggctttgacgctaactcctgtgcggttctgagcgctatcggcaaacagtctcctgacatcaaccagggcgttgaccgtgccgatccgctggaacagggcgcgggtgaccagggtctgatgtttggctacgcaactaatgaaaccgacgtgctgatgccagcacctatcacctatgcacaccgtctggtacagcgtcaggctgaagtgcgtaaaaacggcactctgccgtggctgcgcccggacgcgaaaagccaggtgacttttcagtatgacgacggcaaaatcgttggtatcgatgctgtcgtgctttccactcagcactctgaagagatcgaccagaaaagcctgcaagaagcggtaatggaagagatcatcaagccaattctgcccgctgaatggctgacttctgccaccaaattcttcatcaacccgaccggtcgtttcgttatcggtggcccaatgggtgactgcggtctgactggtcgtaaaattatcgttgatacctacggcggcatggcgcgtcacggtggcggtgcattctctggtaaagatccaagtaaagtggaccgttccgcagcctacgcagcacgttatgtcgcgaaaaacatcgttgctgctggcctggccgatcgttgtgaaattcaggtttcctacgcaatcggcgtggctgaaccgacctccatcatggtagaaactttcggtactgagaaagtgccttctgaacaactgaccctgctggtacgtgagttcttcgacctgcgcccatacggtctgattcagatgctggatctgctgcacccgatctacaaagaaaccgcagcatacggtcactttggtcgtgaacatttcccgtgggaaaaaaccgacaaagcgcagctgctgcgcgatgctgccggtctgaagtaatctttcttcacctgcgttcaaaggccagcctcgcgctggcctttttcttttggataggcgttcacgccgcatccggcaaaaaaaccgcccgcacaataacatcattcttcctgatcacgtttcaccgcagattatcatcacaactgaaaccgattacaccaaccacaacagacaaagatttgtaatattttcatattattattcggttttcacagttgttacatttcttttcagtaaagtcttaattgcagataacagcgtttaatctatgatgatataactcaattattttcatgcacttaaatcataactaagataaatgttagtgtaagcgattacactgatgtgatttgcttcacatctttttacgtcgtactcacctatcttaattcacaataaaaaataaccatattggagggcatcatgcctgacgctaaaaaacaggggcggagtaacaaggcaatgacgtttttcgtctgcttccttgccgctctggcgggattactctttggcctggatatcggtgtaattgctggcgcactgccgtttattgcagatgaattccagattactagccacacgcaagaatgggtcgtaagctccatgatgttcggtgcggcagtcggtgcggtgggcagcggctggctctcctttaaactcgggcgcaaaaagagcctgatgatcggcgcaattttgtttgttgccggtagcctgttctctgcggctgcgccaaacgttgaagtactgattctttcccgcgttctactggggctggcggtgggtgtggcctcttataccgcaccgctgtacctctctgaaattgcgccggaaaaaattcgtggcagtatgatcagcatgtatcagttgatgatcactatcgggatcctcggtgcttatctttctgataccgccttcagctacaccggtgcatggcgctggatgctgggtgtgattatcatcccggcaattttgctgctgattggtgtcttcttcctgccagacagcccacgttggtttgccgccaaacgccgttttgttgatgccgaacgcgtgctgctacgcctgcgtgacaccagcgcggaagcgaaacgcgaactggatgaaatccgtgaaagtttgcaggttaaacagagtggctgggcgctgtttaaagagaacagcaacttccgccgcgcggtgttccttggcgtactgttgcaggtaatgcagcaattcaccgggatgaacgtcatcatgtattacgcgccgaaaatcttcgaactggcgggttataccaacactaccgagcaaatgtgggggaccgtgattgtcggcctgaccaacgtacttgccacctttatcgcaatcggccttgttgaccgctggggacgtaaaccaacgctaacgctgggcttcctggtgatggctgctggcatgggcgtactcggtacaatgatgcatatcggtattcactctccgagcgcgcagtatttcgccatcgccatgctgctgatgtttattgtcggttttgccatgagtgccggtccgctgatttgggtactgtgctccgaaattcagccgctgaaaggccgcgattttggcatcacctgctccactgccaccaactggattgccaacatgatcgttggcgcaacgttcctgaccatgctcaacacgctgggtaacgccaacaccttctgggtgtatgcggctctgaacgtactgtttatcctgctgacattgtggctggtaccggaaaccaaacacgttagcctggaacatattgaacgtaatctgatgaaaggtcgtaaactgcgcgaaataggcgctcacgattaatctccccaagcttcctcccatcgcggaggaagccacctcttgcagtcatcttttcttcgctctatcctctgccgctatgaaaacatcccgtctccctatcgccatccaacaggccgttatgcgtcgcctgcgggaaaaactcgcccaggccaacctgaagctagggcgtaactacccggagccaaaactctcttacacccagcgcggaacctccgccggaacggcctggctggaaagctatgaaattcgcctcaatcccgttttgctgttggaaaacagtgaagcttttattgaagaagtggtaccgcacgaactggcacatttgctggtatggaaacatttcggccgcgtagcgccacatggcaaagagtggaagtggatgatggaaaacgtgctgggtgttcccgcccgtcgtacgcatcagttcgaactgcaatccgtgcgtcgcaacaccttcccctaccgctgcaagtgccaggagcatcagcttaccgtacgccgccataatcgcgtagttcgtggcgaggccgtctatcgctgtgttcactgcggtgaacagctggttgcgaaataaccatctgaactatcaggaactttcctgatttggctgattgcataccaaaacagctttcgctacgttgctggctcgttttaacacggagaagtgcctacactagcgggattctttttgttaacccctaccccacgcgtacaaccgcgtggggagacgacgcggatttttaactatgcgtatcccccgcatttatcatcctgaaccactgaccagccattctcacatcgcgctttgcgaagatgccgccaaccatatcgggcgcgtactgcgcatggggccggggcaggcgttgcaattgtttgacggtagcaaccaggtctttgacgccgaaattaccagcgccggcaaaaaaagcgtggaagtgaaggtgctggaaggccagatcgacgatcgcgaatctccgctgcatattcacctcggtcaggtgatgagccgtggtgaaaaaatggaatttactatccagaaaagcatcgaactcggtgtaagcctcattacgccacttttttctgagcgctgcggcgttaaactggatagtgaacgtctgaacaagaagcttcagcagtggcagaagattgcaattgctgcctgtgagcagtgtggtcgtaaccgggtgccggaaatccgtccagcgatggatctggaagcctggtgtgcagagcaggatgaaggactgaaactgaatcttcacccgcgcgccagtaacagcatcaatacgttgccgttaccggttgaacgcgtccgcctgctgattggcccggaaggcggtttaagcgcagatgaaattgccatgactgcccgctatcaatttactgatatcctgttgggacctcgcgttttgcgtacagagacaactgcgctcaccgccattaccgcgctacaagtacgatttggcgatttgggctaacggagaagaataatgatcaagctcggcatcgtgatggaccccatcgcaaacatcaacatcaagaaagattccagttttgctatgttgctggaagcacagcgtcgtggttacgaacttcactatatggagatgggcgatctgtatctgatcaatggtgaagcccgcgcccatacccgcacgctgaacgtgaagcagaactacgaagagtggtttagcttcgtcggtgaacaggatctgccgctggccgatctcgatgtgatcctgatgcgtaaagacccgccgtttgataccgagtttatctacgcgacctatattctggaacgtgccgaagagaaagggacgctgatcgttaacaagccgcagagcctgcgcgactgtaacgagaaactgtttaccgcctggttctctgacttaacgccagaaacgctggttacgcgcaataaagcgcagctaaaagcgttctgggagaaacacagcgacatcattcttaagccgctggacggtatgggcggcgcgagcattttccgcgtgaaagaaggcgatccaaacctcggcgtgattgccgaaaccctgactgagcatggcactcgctactgcatggcgcaaaattacctgccagccattaaagatggcgacaaacgcgtgctggtggtggatggcgagccggtaccgtactgcctggcgcgtattccgcaggggggcgaaacccgtggcaatctggctgccggtggtcgcggtgaacctcgtccgctgacggaaagtgactggaaaatcgcccgtcagatcgggccgacgctgaaagaaaaagggctgatttttgttggtctggatatcatcggcgaccgtctgactgaaattaacgtcaccagcccaacctgtattcgtgagattgaagcagagtttccggtgagcatcaccggaatgttaatggatgccatcgaagcacgtttacagcagcagtaacccaccttagcgagaaggatctcgttgagactctgagtgacagcgcccttctttccacgcatactgggcgctgttgcttttttgaaccaggaaacagaacctctgacaatgaatttacagcatcactttcttattgccatgcctgctctccaggatccgattttccgtcgttccgtggtctacatttgcgaacataataccaatggtgcaatggggatcatcgtcaacaagccgctggaaaatctcaaaattgaagggattctggaaaagctgaagatcacgccggagccgcgtgatgaaagtatccgtctggataaaccggttatgctcggcggtccgctggctgaagatcgcgggtttattttgcatactccgccctccaattttgcttccagcattcgcattagtgacaacacggtaatgaccacttcccgcgatgtgctggaaacgctcggcaccgataaacaaccgtctgacgtattggtggctctgggttatgcctcctgggagaaaggtcaactggaacaagaaattctcgataacgcgtggctaacggccccggcagatctgaatattctgttcaaaacgccgattgccgaccgctggcgcgaggcggcaaaactgattggtgtggatattctcaccatgcctggtgtggcaggacacgcctgatgagtggaaccttactcgccttcgacttcggcaccaaaagcattggcgtagcggtcggccaacgcattaccggcaccgctcgccctttgcctgcaattaaagcacaggacggtacgccggactggaacattatcgagcgtttactgaaagagtggcagccggacgaaatcatcgtcggtttgccgctgaatatggacggcaccgagcaaccattgactgccagagcgcgtaaatttgccaaccgtattcatggccgtttcggtgttgaagtaaagctccatgacgagcgtcttagcactgtggaagcccgttccggtctgtttgaacagggcggctatcgggcgctcaacaaaggcaaagttgactctgcctctgcggttattattctcgaaagctatttcgagcagggatattaaggcgatttaaacgcctggcggagtgtaaataatatcatcgcgtcttattgccggatgcggcgtgaacaccttatccagcacacatctggcagcggctataggtctgataagacgcgttagcgtcgcatcagacatttattgcctttgtaggcccgataagcttgcgcatcgggcatggcaacgtcacaaacgcccttcccccacccggtgctgataactctgctgaaacgttatcatccccacctgctgcccggtttgaataacatgcggtaactggtgggttttcccttcgcgaatcaaattccccaccgcgggtgtgttaatcagcaattcaaatagcgccacgcgtccttcctgtttatccacttccagcttttgactcagcactgcccgtaaactacctgccagttgattacgcacggggtctttttcctgcgccggaaaactatccaccagtcgctcaactgcctgcgcggcaccacgcgtatgtaatgttgccagcaccaaatgcccggtttctgccgccgtcagtgccagacggattgtctcgctgtcacgcagctctccgagcaaaatcacatcaggatcttcccgcaatgcggcccgcaatccgcttgcgaacgtcatacagtgcaaaccaatttcccgctgctggatcaaacatcgctggctggcatagagatattcaacaggatcttccagcgtcagaatatgcgcatcggcatgttgattgagatagccaaccatcgccgccagcgtggtagatttgccactccccgtcgcccccgtcaccagaatcaggccattctcgctcttgagtaattccggcaataccgttggtgcgccaagctgttcgagctgcgggcagtggctaggtaacagccgtaacgccaggctaatgccatgccgttgcgcgaatgcgctgccacgcaatcgctggttttccgccaggctcacggcaaaatccagctgaccattctccagcaatattgcccgctgatcgtcatccagccactcccgcagtagctcttcgacgtccggcgtatcaaacggcgcagcttccattctgccgcgaatgcgccatcgtgcgggccaggcgctgcacaggtgtagatcgctgacgttatgctttacactaagggccacaatttcttccatattcatactaagatcctcggaaaatgaacgatattgcgcataacctggcacaggtccgggacaaaatcagtgcggctgcaacgcgttgcggccgttctccagaagaaattacgctgcttgcagtcagtaaaacaaaacctgcgagcgccatcgcagaagccattgatgccgggcagcgtcaatttggtgaaaactacgttcaggaaggggtagataaaattcgccactttcaggaactgggcgtaacaggattagaatggcattttattggcccgttgcagtctaataaaagccgcctggtggcagagcatttcgactggtgtcataccatcgaccgtttgcgcatcgctacccgtctcaacgaccagcgcccggcagaacttccccctcttaacgttctgattcaaattaacattagtgatgaaaacagtaagtccgggattcaactggctgaactggacgagctggcagctgcggtcgctgaactaccgcgtttacgtctgcgcgggttgatggcaatccctgcgcctgagagtgaatatgtaaggcagtttgaagttgcacgccaaatggctgtagcatttgccggactgaaaacgcgctacccgcatatcgacacgctctctctgggaatgagcgacgatatggaagccgccattgcggcaggtagcacgatggttcgtatcggcactgcaatttttggtgcgcgtgattactctaaaaaataaggaattaaaggaacgccatgaatacgttgactttcctgcttagtacggtcattgagctgtataccatggtgctgttattacgcatctggatgcagtgggctcattgtgatttttacaaccccttcagtcagtttgtagtgaaggtaacgcagccaattatcgggccactgcgccgcgttattccggcaatggggccaattgacagcgccagcctgctggttgcctatattctcagttttatcaaagccatcgtgctgtttaaagtggtgaccttcctgccaatcatctggattgccggtttactgattctgctgaaaaccatcggcctgctgattttctgggtcctgctggtgatggcgattatgagctgggtaagccaggggcgtagcccgattgaatacgtgctgattcagctggccgatccgctgctgcgcccgattcgccgcctgctaccggcaatgggtgggattgatttcagcccgatgatcctcgttctgctgctgtatgtcatcaatatgggtgtcgcagaagtattacaggcaaccggaaatatgctgctgccagggctgtggatggcgttatgaatgccgtaacagttaatgatgacggtctggttttacggctctatattcagccgaaagccagccgtgattctattgtcggtttacatggcgacgaagttaaagtcgccattaccgcgccgccggttgacggccaggccaacagtcatctggtgaagtttctcggtaagcaattccgggttgccaaaagccaggtggtgattgaaaaaggcgaacttggccgccacaaacaaattaaaatcattaatccgcaacaaatcccgccagaaatcgcggcgttaattaattaagtatcctatgcaaaaagttgtcctcgcaaccggcaatgtcggtaaagtgcgtgagctggcgagcctgcttagcgacttcggtcttgatatcgtggcccaaacagacctcggcgttgattccgctgaagaaaccggcctgacctttatcgaaaacgcgattctgaaagcgcgccatgcggcaaaagtgaccgctttaccggcaattgccgacgactctggtctggcggtagatgtgcttggcggcgcgccgggcatttactccgcgcgttattccggtgaagacgcgaccgatcaaaagaatctgcaaaaactgctggaaacaatgaaagacgtaccggacgaccaacgtcaggcgcgtttccactgcgtgctggtatatctgcgtcacgcggaagatcccactccgctggtatgccacggtagctggccgggcgtgattactcgtgaaccagcgggcactggtggctttggttatgatccaatcttcttcgtaccttccgaagggaaaaccgccgccgaactgacccgcgaagaaaagagcgccatttcccaccgtggtcaggcgttgaaactgctgctggacgctttacgtaatggttaaattacctccgctgagtctctacattcacatcccgtggtgcgtgcagaaatgcccgtactgcgatttcaactctcacgcgttgaaaggagaagtgccgcacgacgattatgttcagcatctgcttaacgatctggacaacgatgtggcttacgctcagggccgtgaagtaaagacaatctttattggcggtggtacgccgagcctgctttccggcccggcgatgcaaacgctgctggacggcgtgcgtgcgcgtttgccgctggcagcggatgcagaaattactatggaagcgaaccctggcacggtagaagccgatcgctttgtcgattatcagcgtgctggtgtgaaccgcatctctattggtgtgcagagttttagcgaagaaaagctgaaacgacttgggcgtattcatggcccgcaagaagcgaaacgcgcggcgaagctggcgagcggtttagggttacgtagctttaaccttgatttgatgcatgggctgccggatcaaagtctggaagaggcgcttggcgatctacgccaggccattgaactgaatccgccgcatctttcctggtatcaactgaccatcgaacccaatacgctgtttggtagccgaccaccggtgctgccggacgatgacgcgttgtgggatatattcgaacaggggcatcagttattaaccgcagcgggttatcagcaatatgaaacttccgcttacgccaaacccggttatcagtgccagcacaatctcaactactggcgctttggtgactacatcggtattggctgcggcgcacacggcaaagtgaccttcccggatgggcgcattctgcgtaccaccaaaacgcgtcatccgcgtggttttatgcaaggaaggtatctggaaagccagcgtgatgtcgaagccacagataagccgtttgagttctttatgaatcgcttccgtctgctggaggccgcgccgcgcgtggagtttattgcgtataccgggctttgcgaagatgtgattcgcccacagttagacgaggcgattgcccagggttatctcaccgaatgtgcggattactggcagataacggaacatgggaagctgtttttaaatagcctgctggagctttttctggctgagtaaacttgtattgccggatgcggcgtgaacgccttatccagccgacatgtggcagcggttgtaggtctgataagacgcgcaagcgtcgcatcagacgttgattgccggatgcggggtcaacgccgcatcctgctacaaatcgtgcactatatcaaacttacttaatcaccccattgcgccgcagttgttcggtatcttttttccagcgttcattagcttggttgatatcgtcaattttcatcaaaatcgcgacttttttactgtttatttcactaactttcatcgttaacggatattgccctttttcgagcgttacccagtcatcctgcaatttacggctaagtttttgactttgcagaaaagtctgtcgccgttgttcgttgatatcgaaatctcgtttctgctgaatcggcacttcataacactcttcactctgtttatgacatgccgcaatcgccggttgataaacctctttgtcatatttaaccgcgaacgcctcgctatcgttctgtttattaaactcatcacgctgttggtgaatttttttaaaggcgtcttcgcgggtcatttgcttaccgtttgcatcttttccccaatatgcatccgctgctttctgcgccgccaccatttgcttatcaagcgctttcacttccttttccagcgcaggaatgctgttcttctgggtattcaacgcagattcaagctgactaaagcgataattgaaatcttcgctattcacgatcagatatttattattcgttttgatatcgtcgaccacccgcccacgatcgctggctgccgcctgaaaagagtaaaagttcacgctccagccagacgcgggcgttcctttactggttaacatcgcgctgaattttaccggtttatctttcgtccaggtctgttcgagcagttcgtaatctgccaactgaccgacccaggtatagagatcgtcactggaagagacatcgccttccgcactccaggtggcctgattacccttagcatcaagattttttaaggtgatagcatcaagcttgagaatgccgtgatactgctttttgaattgatcttttaagatattttcagttggcggttcgccatctgcccaggcattaccagtcatcaacataagcagtgccgtgccaacaatccattgctttttcacccgaaaaacctcacgcggaataatttattccggtgattatcattagggtaattaaaattggcaatggacgtgagtctgaagtgaaaaagccccggcacgataccggggcgaggcgattagtactgattgaagatctgctggatctgctgcggatctttggtttgcgtcagagccagttgcagcagaacgcgcgctttttgcgggttcagcgtgccagaggcgacgaagccgtatttcgcatcatccacttcggcatcctgagtggtagcgcccgtcggtacgcgggaagaacgcacgactgcagtaccggttttcgcggcggtcgccagcgtgccgaacacagatttatacaggttgccgttacccacaccagcgctaacgatgccatcatagcccgcatctaccagtgctttagccggaagatcggatgcgttagcgtagttataaacaatgccgactttcggcagttcattcagcttagagacatcgaatggcgtgtcgctggtatgcttacgtgccggggtacgctggtagtcaatcttaccgttgtgaatgtaacccagaggaccgtagttaacagacttgaaggtcgctacgtcggtggtgttggttttggtgacgtcacggccatcaagcacggtgtcattcatcactaccagcacgccacggttggcggaggctttatcagctgcggtcactaccgcgttatacaggttgaatggaccgtctgcgctcatagacgtggacggacgcattgcgccgaccatcaccaccggtttgtcgcatttcaccgtcaggtcgaggaagtaagcagtttcttccatcgtgtcggtaccgtgggtaatgacgaagccgtcggtcttatcgcagtcggtgttaatttttttcgccagtgtcagccagacattatcgttcatgtcctgggagccgatattcactacctgctcgcctttaacgttcgcaatgtcttttagttgcggcaccgcattaaccagattttctacgccaactttacccactgtgtagttagatttggttgcggagtcaccaccaccggcaatggtcccgccggttgctaaaatggtgatattgggtaatgccaatgctgcaccactaaaacccataaccagtgcggcaagtgccgtctttttgaaaaactccatttcattcctccagttacgtgaacgctacgcattatcccttagctctgtatgggaaatttgacgttaaacaatttacaacgtgaatatattttggagatctacaaagttagaggcaggtaacaaaacgaagaattaaacggcataaaaaagtattatgccgtcttaaaatagaggattattttaaattcccgaccagggctttgcggctatcttccagagtcacaacgcggctacaaacatctttgccaaactgctggaaatctttttcctgctttttccactcggtttggatactggattgcagcccccccaggcttcccagcacattctgtaatgggttaccgccgctttttcagcaccgctttcgcgcccatttcattaatgctgtcctgtaaaattccacccattgcctgattcactaattgctggccttcggcgcgaacctgatcaatggctttatagtgaaacgtcaggccatcgctgcgcgtttcaataatgcggttcatctgctctttcagctgcgcatcaagtttggtcagacggctgcgcattttgctgctttcgcccatctcctgaacgataattttatccagagcaatacgggctttctcgacgcggcttttcgcgccttcatcaatccacggcagcgtgctgcgtagttcagcctgataatccttcgcctgctcgcgctgggcggcattcagggaatattgcttaccgttatacatcacgttgccgtctggcgtgatcaccagattgccgttttcgcccttcacctgcacggtttgcgggctgacaatcacatcgtcacgcggcgtgacgctgcactggtagtcggcgtgagcggtcattgccgtcacactaagtgctgccgccagcagcattttgcgcatcatagtcttccctcaagaaaaaatcaggccagcatttgctggccccagattgataacaaagtacgcgttttccatgccggatgcggcgtaaacaccttatcccgcctactcgatcgtgcatctttccaggcctgataagcgtagcgcatcaggcagttttgcatttgtcatcgcccgtatgctttcttagtcccaccaaacgtcgaaaagttcgctggtgcgtacctcatccagtttgcgctcttccagccacttacgcacaatcgcctgatgttcttcggtgcatttgccgatttcctgcatgcagatcagaccttcccaggccagataaccgctgccgtcaaaggccagtttgttcggttcgataacctcgttaataaaatcatcaacggttttatcaatctgttcttcgcttgtaccttccgggaatcgccatgccacgctaaatcctaattcctggaattcgtcgatgtgcatttttttacgcagacgacggctacggttctttgccattatttcaccctctcgaacattaagtcccatactccgtgaccaagacgatgaccacgttgttcaaatttcgtcaccggacgacttgccggacgcggtacgtaatcattgctctcactcaggtttttataaccgtcaatagaagacatcacttcaagcatatgttccgcataaggttcccagtcggtcgccatatggaatacgccccccagctgcagtttgctttttaccagttcggcaaacggcacctgaacgatacggcgtttattatggcgcgctttgtgccacgggtcagggaaaaagagctgcaccatgcgcaaactattgtcaggaatcattttatgcagcacttcaaccgcatcgtgacacatcacgcgcaggttgcttaaaccttcttcatgcgcagaagccaggcacgcaccaacgcccggactatgcacttcaatgccgaggaagtcctgctcagggcgatctttagccattgccaccaggctcgcccccatgccaaaaccaatctcaagcgtcaccggcgcttcacggccaaaaagcgcggggaaatccagcatatcttcgctgaactcaacgcccatcaccggccagtagttttccagcgcatgttcctggcctttggtcagtcgcccctggcggcgcacaaaactacggatacggcgcagtgggcggccgttttcatcaaattccggactaatgacgtcgtttttcataaaggtttagtcgcttgtgaaagtgttctgaaaacgggcattatccaaagttagttgccggatgcaagcatgataaggccgtggctgcggaaagttccggtttacaccctgccgtcgctgtgctgcaatcttgcccccaacaacagtgaattcggtgaccatgcaagcgagccaatttagtgcccaggttctggactggtacgataaatacgggcgaaaaactctgccctggcaaattgacaagacgccctacaaagtatggctcagtgaagtgatgttgcaacaaactcaggttgcgaccgttatcccctattttgaacgctttatggcgcgcttcccgacggtgaccgatctcgccaatgcgccgctcgacgaagttctccacttgtggaccgggcttggctattacgcccgcgcgcgcaatctgcataaagcggcacaacaagtggcgaccttacacggcggtaaattcccggaaacctttgaggaagttgcagcactgccgggcgtcgggcgttccaccgcaggcgcgattctcagcctttctctgggtaagcactttccgattctcgacggtaacgtcaaacgcgtgctggcgcgctgctatgctgtaagcggctggcctgggaaaaaagaggtcgagaataaattatggagtttgagcgagcaggtgacgcccgcggttggcgtggaacggtttaatcaggcgatgatggatttgggtgcgatgatttgtacgcgcagcaaaccgaaatgtagcctctgtccgctacaaaacggatgtattgccgccgccaacaatagctgggcgctttatccgggcaaaaaaccgaaacagacgctgccggagcgcaccggctactttttgctattacagcacgaagatgaagtattgctggcgcagcgtccgccgagcggattgtggggcggtttatactgtttcccgcagtttgccgacgaagaaagtttgcggcagtggctggcgcaacggcagattgctgccgataacctgacgcaactgaccgcgtttcggcataccttcagccatttccacttagatattgtgcctatgtggcttcccgtgagcagtttcaccggctgcatggatgaaggcaatgcgctctggtataacttagcgcaaccgccgagtgttggcctagcggctcccgtggagcgtttgttacagcagttacgcactggcgcgccggtttaacgcgtgagtcgataaagaggatgatttatgagcagaacgattttttgtactttcctgcaacgtgaagcagaaggtcaggattttcagctgtaccccggcgagctgggaaaacgcatctataacgagatctccaaagaagcctgggcgcagtggcagcacaagcaaaccatgctgattaatgaaaagaaactcaacatgatgaatgccgagcaccgcaagctgcttgagcaggagatggtcaacttcctgttcgagggtaaagaggtgcatatcgagggctatacgccggaagataaaaaataaaaacagtgccggagcacgcctccggcaacttgcataaaaacaaacacaacacgcacccggaatgatgaaaaaatatctcgcgctggctttgattgcgccgttgctcatctcctgtagcacgaccaaaaaaggcgatacctataacgaagcctgggtcaaagataccaacggttttgatattctgatggggcaatttgcccacaatattgagaacatctggggcttcaaagaggtggtgatcgctggtcctaaggactacgtgaaatacaccgatcaatatcagacccgcagccacatcaacttcgatgacggtacgattactatcgaaaccatcgccgggacagaacctgccgcgcatttgcgccgggcaattatcaaaacgttattgatgggtgacgatccgagtagcgtcgatctctattccgacgttgatgatattacgattagcaaagaacctttcctttacggtcaggtggtggacaacaccgggcagccgattcgctgggaaggtcgcgcaagcaacttcgcggattatctgctgaaaaaccgtctgaagagccgcagcaacgggctgcgtatcatctacagcgtcaccattaacatggtgccgaaccaccttgataaacgtgcgcacaaatatctcggcatggtccgccaggcgagtcggaaatatggcgttgatgagagcctgattctggcaattatgcagaccgaatcttcctttaacccgtatgcggtcagccgttccgatgcgctgggattaatgcaggtggtacaacatactgccgggaaagatgtgttccgcagccaggggaaatccggcacgccgagccgcagtttcttgtttgatcctgccagcaatattgataccggcaccgcgtatctggcgatgctgaacaatgtttatctcggcggaattgataacccaacaagccggcgttatgccgtcatcaccgcctataacggcggcgcaggcagcgtgctgcgagtctttagcaatgataagattcaggctgccaatattattaacaccatgacgccgggcgatgtttatcagacgctgacgacccgccatccctctgcggaatctcgccgttatctttataaagtgaataccgcgcaaaaatcctaccgccgccgataattccattaaccgcccctgacgatgctcaggggcaaaaatgttatccacatcacaatttcgttttgcaaattgggaatgtttgcaattatttgccacaggtaacaaaaaaccagtccgcgaagttgatagaatcccatcatctcgcacggtcaaatgtgctttttcaaacactcatccgcatcacgatgtgaggaaattaacatgaatcttaagctgcagctgaaaatcctctcttttctgcagttctgtctgtggggaagttggctgacgaccctcggctcctatatgtttgttaccctgaagtttgacggtgcttctattggcgcagtttatagcagtctgggtatcgcagcggtctttatgcctgcgctgctggggattgtggccgacaaatggttaagtgcgaaatgggtatatgccatttgccacaccattggcgctatcacgctgttcatggcggcacaggtcacgacaccggaagcgatgttccttgtgatattgattaacagctttgcttatatgccaacgcttgggttaatcaacaccatctcttactatcgcctgcaaaatgccgggatggatatcgttactgacttcccgccaatccgtatctggggcaccatcggctttatcatggcaatgtgggtggtgagcctgtctggcttcgaattaagccacatgcagctgtatattggcgcagcactttccgccattctggttctgtttaccctgactctgccgcatattccggttgctaaacagcaagcgaatcagagctggacaaccctgctgggcctcgatgcattcgcgctgtttaaaaacaagcgtatggcaatcttctttatcttcagtatgctgctgggcgcggaactgcagattaccaacatgttcggtaataccttcctgcacagcttcgacaaagatccgatgtttgccagcagctttattgtgcagcatgcgagtatcatcatgagcattagccagatctctgaaaccctgttcattctgaccatcccgttcttcttaagccgctacggtattaagaacgtaatgatgatcagtattgtggcgtggatcctgcgttttgcgctgtttgcttacggcgacccgactccgttcggtactgtactgctggtactgagcatgatcgtttacggttgcgcattcgacttcttcaacatctctggtagcgtgtttgtcgaaaaagaagttagcccggcaattcgcgccagtgcacaagggatgttcctgatgatgactaacggcttcggctgtatcctcggcggcatcgtgagcggtaaagttgttgagatgtacacccaaaacggcattaccgactggcagaccgtatggttgattttcgctggttactccgtggttctggccttcgcgttcatggcgatgttcaaatataaacacgttcgtgtcccgacaggcacacagacggttagccactaattacgcaaagaaaaacgggtcgccagaaggtgacccgttttttttattcttacttcaacacataaccgtacaaccgtttcacgccatccgcatcggtttcgctataaacaccttgcagctccgggctaaatcccggcaacaaattcaccccttcttccagtgcaaggaaataacgttgaaccgccccaccccagacttccccgggtaccacgcaaagcacgccaggtggataaggcaacgccccttctgccgcaattcgcccttcggcatcacgaatccgcaccaactccacgtcaccgcgaatataagcgctatgcgcatcctgggggttcatcaccacactcgggaaactctgctggcggaacatcgctttttgtaggtctttgacgtcgaaactgacatacagatcgtgcatctcctgacacaactggcgcagggtgtagtcgcgatagcgcaccggatacttgttataaacgctcggcaacacctcaaccagcgggctgtcatcctcaatatgctgttcaaattgcgccagcatcgccaccagttgtgccagcttctcgtggctttccgccggagttaataaaaacagaatggagttgagatcgcacttctccggcacaatgccgttctcacgcagatagtgcgccagaatcgtcgccggaacgccaaagtcgctatattcgccggtttcggcatcgatacctggtgtagtgagtaacagcttgcacggatcaacaaaatactgatccgcggcatatccttcaaagccgtgccacttcgcccccggctcaaaactgaaaaaacggcggtcgctggctaacacacttgtcggataatcctgccacaatttgccatcaacaacgggcgggataaacgggcggaacagcttacagcgcgcaagaatagccttgcgcgcttcaatccctatctcaacacactcagcccacagccgacgcccactctccccttcatgaattttggcgttaacatccagtgcagcaaacagcggatagaaagggctggtagaagcatggagcataaaggcgttattcaaccgcttatgcgggcaaaaacgcgcctgtccgcggatatggttatcttttttatggatctggctcgtctgactgaatcccgcctgctgtttgtgcacgctctgagtcacaaagatccccggatcgttttcgttaagttctaacagcagcgggctgctatccgccatcatcgggataaattgttcataaccgacccacgcggaatcaaacagaatgtaatcacacagatgcccaacggtatcgatcacctgacgggcgttatagacagtgccgtcataggttcccagctgaataatcgccaggcgatacgggcgcggcaggtcggctttttctggcgcaacgtcgcgaatttgctggcgcagatactcttcattaaaacagtgcgcatcaataccgccaatgaaaccaaacgggttgcgactagcttccagatagaccggcgtcgcccccgcctgaatcagcgcgccgtgatgattgctcttatggttgttacggtcgaagagcaccagatcgccacgcgttaacagcgcattcgtcaccactttattcgctgcgcttgtgccgttcagcacaaaataggttttatcggcatgaaagactttggctgcgaatttctgcgcatctttcgcgcttccttcatgaataagcagatcgcccaattttacgtcagcgttacacatatcggcgcgaaagacgttctcaccaaagaaatcgtaaaaatggcgtccggcaggatgctttttaaaaaacgcaccatgttgatgtccagggcaagcaaaggtgctgttgcccatctcaacgtactgcgtcagcgtgtcataaaacggtggcagcaaattctcttcatactgacaggctgcggattccagctccagccactgctgctcgttgccgttgattaccgccgtaacgcccgcaggtaattcaacagcatgttcggaatacaaaaacaccggtagatgaaaaccggtgcgcttaagcaacgcaagaatgccactgcgactatccgcagcggtaatgacgactgccgcgacgtccgtaaaatcagtatctcccaacgccaccacgcgacgatgagaagaaagtcgggataccagttcactactggcggcaatattcatacttttcataagcgcaaacccgtttcggggaagtaagaataccggacaaggtggaaaaccctgccccatgagatatgggtcaaactggtcaccagctccgaccgccagacatcagtaaaagcagaaacgctctgattttactgttgtcctgcagtgagcgtgcgttaacttcaccgcatgagcagtaacatagaaagggaaacgtttcgcgcgaaacggcgataagcgagagaatgtaaggagatggcgtgcatcgggcaaactccgtacagagaggagaaaattcgcgcaatcatggcacctttcgctaaagcgtgcaagccaggactttgcgaacaaacaagccatcgacggcaccaaacggtcataataagaaaatcaaacaatacagctaacaggaactcttgtggtcatcggcccttttatcaacgctagtgcagtcttactgggtggcgttctcggcgcactgctcagccaacgcttaccggaacgtatccgcgtctccatgacaagtatttttggtctggcaagcctggggattggtattttactggtggtgaaatgtgccaaccttccagcgatggttttagctacgctacttggcgctctaattggcgaaatttgtttgctggagaaaggtgtcaatacagcagtcgccaaagcacaaaatctgtttcgtcacagtcgtaagaagccagcgcatgaatcttttattcagaattatgtcgcgattattgtcctgttttgcgccagcggcaccgggatcttcggggcgatgaacgaagggatgaccggcgatccgagtattttaatcgccaagagttttcttgatttctttacggcgatgatcttcgcctgcagcctgggtattgcggtaagcgtgattagtatcccattactgatcatccagttaacgctggcgtgggctgccgcgctgattttaccgctgaccacaccgagcatgatggcagacttcagcgccgtaggcggtttattgctgctggcaaccggattacgcatctgtggcattaaaatgttcccggtggtcaacatgcttccagcactccttctggcaatgccgctttccgccgcctggaccgcctggtttgcctgacaatgcgtgcaatatcggcaaagtgatgatagattgtgcagtctgcagtaaattgaagaaatttgattgacgagacgaggcgaatcaggtttaatgcgccccgttgcccggatagctcagtcggtagagcaggggattgaaaatccccgtgtccttggttcgattccgagtccgggcaccactaattcttaagaacccgcccacaaggcgggtttttgcttttggatctgacaataaccttcacgaaaaaaattagcttataaagtctgggggaattactctcgccacgttaacgagagtaattttattgatattaatctcctgatactttacccccgtccaaactccagccgctgcacattcaccatcccaggcttctcagcagcactgacatcaatttgtgtcacccgcagcgcatagaacgccattttgaatttacgaacggacgcattatcagtgactttaacggcatgggcaaagtgaaatatcattttttaacgataaaaagagtgttatttcttgtgtatcagacaataagcattcattcaaaacctttagaaataatcaaaacacaggtattccactggttaatatattcacatatgaaatgaataaatattggaatatataaatattgaatattttgattaatccccgtactgattattcttcataatcagtacggggttgctacaacatgtattactttttcaccacaattaacggttcaatatcactctcttttttgatgaccagactttcatcaccgcgcaaacacgtcccaccgtagttgccgccaacggtgaaggtacatacctgaatgtatttaccgtccactttcggcaaacaccacagttgctgatagatgtttttctgctcggcaaatttaccgctggttttgtccagcacctcttcatgatggctgacgaggtcgatattgctgccacagcgaccggcgatcggtttcactgcgtaacctgttttcaccagttcatcattaacagtgaaatcggtatccagcaggtaacgatggtgcgggaacaggctccagaggatcggcagaatcgctttgttgccggggatcaccgtccacagcggctcaaagaccagcacttccgggcgcagcaatacgtcgataagacgcacttcgttttgcggatgaccggtacggattggcaccgcagcaaactcacggtcgctaacttcacgaatctgatcaaacgcggtttcccacgcccaggttttccacacgcagttaaccagtcgcccttccccatcaatcagttgcccggcagcatcccagcccagttcatccaatccacgcaagatacgcgtttcaaagcccgcctggtgcagcgcctgctccataaactgcgcgtgatagttttcctcgatatctttgtcctgcatgatatggacaaacggacgtgcacgactgtgtttccaggcaccagccaattcgttaatcagcccttccgccggattgaagccgttgcctttatagccctgctccgcccaacgttcgaggatcaagcccgcttcggtatgacaggaggcggagtcggcgttgtactcgtaaaccttcaggccacgctcatccatgcagaaatccatacgaccagtgatcatatggtgacggcgacgctgccaggagagacgcaaacgtggccagaggattttcgggatgtcgaacagcgccagcaggttgtcatctttcagcaccttgtcggttgcgtgaagatacatcaggtgcagctcgttggtggctttaattagctcctgctcggcactctcggtaatggtgtagtaatgataaggatcctgattgatcacctgaccgttggcctgcacataggcgttttgcagcggatctttttcatccagccatttaccgtcaaactggcctttgttttccaggcgcgctccgctgattttcagcagctcgcctgcaatttccggctgcggtaagctgtattcagtatcttccgtctggatcatccagcccagaatggtggtgtcatcaaaagtgtctttcagggtatagcagccgttttcgaccaccatctccagctcgcgcgtccactgttgcccttgcggcaacggggaatgaatcacgttctgttccgcaatacggactttgttgccatgcaattgggtaatgatggcgacatggccagtgtctttaaattcaccgcctttatcccagataagaagcgcacccgcgaccggcgcacgcgggctgccgttaggaaatgcctgcaatggcaggatgttgtcattaaccacttctcgcaggaagcgcaggctgaaaatctcccacgccatacccacgtcagtaaagaccacaccgtaattcagaaagagaaaacggcgagcaaattcaacgcattgccacttgtggcccatatattcgtcgtcgatatagctacggaatacggcgtcatcttcgtattcctgcggatcgagagaactgtaatcactagagtagattgctaccccacctggggcgtagcccaataatgtcccgaacggggcatcctggctggtcgttcctttgctcatcactttacctttaacaatacaacctaagcagttggcgtaattgttgtgctctgattacctgctcagcgacattaaccggacagaggtcagactaatcatacacctcatcgcagcggctggcgcaaagggttaaaaaattcacattctgtacagcaagtgacctgctacactgcttcaacactaccactcagaaggcaactcactatgacagacaatacttatcagcccgcgaaagtctggacgtgggataaatccgctggcggcgcgttcgccaatatcaatcgcccggtttctggtccgacgcatgaaaaaacgctgcccgttggcaaacacccattgcaactttatagcctgggaacgccgaacggtcagaaagtaacgattatgcttgaggagctgctggcgctgggcgttactggtgcagagtacgacgcctggctgattcgtattggcgatggcgatcaattctccagcggctttgtcgaagtgaacccaaacagcaagatcccggcgctgcgcgatcatacgcataatccgccgatccgcgtgtttgaatctggtagcatcctgctttatctggcggagaaatttggctacttcctgccgcaggatttggcaaagcgtactgaaacgatgaactggctgttctggttacagggcgcggcaccgttcctcggcggtggttttggtcacttttaccattacgcaccggtaaagattgagtacgccatcaaccgctttaccatggaagccaaacgtctgctcgacgtgctggataagcaactggcgcagcataagtttgttgcgggcgatgagtacaccattgcggatatggcgatttggccgtggtttggcaacgtggtgttaggtggtgtgtatgatgccgctgagtttcttgatgcgggcagttataagcatgtacaacgctgggcgaaagaagtaggcgaacgtccggcggtgaaacgtgggcgtattgttaaccgcaccaacggaccgctgaatgagcagttgcatgagcgccatgacgccagtgatttcgagacgaatacggaagataagcgtcaggggtaagggttggtgttcgtcgcagcaagccatccaggccggataaggcgttcacgccgcatccggcaatcgtgcacaatgcctgatgcgacgctgccgcgtcttatcaggcctacgaaagctaatcatcacgcgctggtaatgtcgtaatccatttggcgcagtgcgtctaatgtggctttggcttcatcttcgtcgatgatgctcatggcaaatccgacgtgtaccagcacccactggcccagtagatcggcagggttaccttcacaaatcagggcgatattcacatcgcgcttgataccacatacttcaacctgcgcaagctggtgaatatcttcaccgacagccagcacctggcctggaacgccaatacacattattaactccggttattcaacttcaatacttttgacgatcaggctatcgccggtatcgacacgcaaccgctcgccgtgacagagcggacactgcgcatcgtgctgatgaatctccaccacctggctgcaatcccagcaccaagcctgggcgggtttatagacgatatgtaaatcgcacccttgcgccaccgttccgtggcagacaatttcaaaactaaaacggacggcgctctcctcaacgcaggagagcgcgccaatttccagccacacggcggtgacgcgcttaacatcgtgctgctccgcctgccgttggataatttcaacggcgctctggcaaagagacaactcatgcattttcgccactcctgcgaccaaacagcagggcgcgacgccctgcgtgtggtacatccggattcgtgactggcaggctaaggatcattcgtgcgcagtcatccgtcaggcgttggccctcttcaatgctcatgctgtggctaagcgggctcatcaggctacaggagagatattggctaacaccgtccagttcgccaacggtaaaggtcatagtgccatacggcagttgcagaccaattttttcactcactttgcgcagcggccagagttgatccgggccggggaagataactgcactcagcatccacggggtgatcacacaccccgtccactgaccttcgaacagcgtaaaatcagaaacatacaccggcatactaggatgcagaaaagagagatcgtgcatgctacgccgggcaatttcttcaaacactgcctgtacttgcgccttcggggaggtctggaaacctgctatctcttcagtcatgaatcgcctcccgtgggatggcttccacgccagattcacgcagcgcagccagaacctgctcaagcgcaggttcaatcattgcttcaaccgtcggcgttaagccgatgtgtggctccaggctttccgggatcacgccgaccagggtcagctttttcggaaactcgccggtgaagcgcagggcgctcaagacgtcggccaggccaagctgatgcggagagattttgttggtaaacaacgccggaacttcttcatcccgcaggatcatcatcgttcccggcgcgttctttttgctgacaatggcatccgcaataatcaaatgatcgcgatttgccatgtcgccaagcagctccattcccgccgtgccgccatcgaggatctcaacataatccggcagaatgtatcgttgctctaacgcttcgacaatccgcacaccgatggcttcatcggtcagcaaaatattgccgacccctaagactaaaatacgcattacagaaccttcacactaaccacttcgttgccgtcagcatccactacgtgtaccgcacaggccatgcacgggtcaaaggagtgaatggtacgcaccacttccagcggtttattcggatcggcaaccggtgtacccaccaggctctgctcgtaaggaccgacgtcatcattgaagttacgcggaccagagttccaggtacttggaacaaccgcctggtagttgctgatgataccgtctttaataaccatccagtgagagagcataccgcgcggcgcttcgaggaagccaacacctttgaattcacccgttgccggaatgttcggcttcacaaaggtggtgtgatcgcctttgccgatattggtgatcagtgcactgtattggttttgcaggatatcctgcaattcacagcagtgaacggtacgaccaataatacggcccagcgtggagtgcagctgtgccacttccagcgtgttgccagtcagtttctgataaatcgcaacgatttcattcagtttgttctgggtagattcgcgacctgccgccagtttcaccagcatattagccagtggccccacttctaccgttttgccgtagaaagtcggacttttcacccaggaatatttcccgtcgtcagaccaaccatcataagccggaatggtggtgccttcccacggtgcctgcggcgcttcgtctttataccaggagtgcttcgcgctttcctgaatgcctttgatcaggtattcatcggaatgagaagtgatcggacgatagctggacagatccgcattctcaatgtagccgcccgggaacaggaagctgccgtttttactgtcggtcgggaattccggcacgctcaggtagttcaccgcacctttaccgcgtgtcagccattccgggtagaacgcggcaataactgcggtatcaaccttataaacctgctcaacaaagtcgctcagtttgtcgatgaaagacttgatgtacatcaggcgctcaaggttcagcacgcccaaaccgtcgaggttgatcgggttcgcgacaccacctaccgccaggttctgaatgtgcggcgttttaccgcccagcagcgccacgacgcggttagcgtcacgctggcactccaacgcttgcaggtagtgcgctaccgcaatcaggttcacttccggcggcagtttcatcgccggatgaccccagtagccattagcgaaaatacccaactgaccgctggcaaccagatctttgatcttgttctgaactttggtgaactcttccggactgttcaggtgccaggtgctaacgcctttcagcatttcggaggctttggttgggtcagcttgcagtgcagaagtgatgtccacccagtccagcgcgctaagctgatagaaatgaacaatatggtcatgcgtggtgtgcgcagccagaatgatgttacggatgtattgcgcgttaaccggaacgtcgatattcagcgcactttctgccgcacgaacggaagacagcgcgtgagtggtagtacatacgccacagatacgttgcacaatcatccatgcatcgcgcggatcgcggtttttcacgatctcttccatgccgcgccacatggtaccggaagcccatgctttgctaacgacgccattttcgatttcgcaatcgatgcgtaaatgcccctcaatacgggttaccggatcaatagtaattctctggctcatgctttgctcgcctcatgacgattatgatcgttttgttttaaaggaggaagtatcggcagtagacgaatgagtacgatgtaagcgcaaatctcaatagccacaaaaccaatagaaatcaacagttcttcccaggtcgggaagtaggcgtaaccgccgcccgggttgaatgccaccaggctataggtcagacgccaggttgcacaacctaacagtgcgctcagtgcactcaggaacagcatgcgggaatcattacgcagcttcgccacacgcagaacgaccagcgggaagagcatcagcaggacttcaatccagaacatcacggagtagaagtcaccggcaaacgctaagctcagcttgtcgcgatagataagctcgccaaagcgcagcacgatgaaaatcgccagcaacacactgatggtgttggtcagcttaacaaacagactcttttcatccggaccgttgccacgcagacccgcctgcaccaggctaccttcaaagatgacaatgctgaagcccatgatgaacgccgtcagcaggctgaacagcggcaacatttcatagctctgccacaacggatgcaccttgtagcccgcgctgatcatcaggctccccatactagactggtgcatggtcggcagcagcgcaccgagcgcgatgatgaagaacatcaccttgtttagtcgctgtaggctcaccttccaccccagacgttcaaacagtgccggagcaaactccagtgccatcacgccgatatagatggtcatacagaccgccgtctcgaacagtacgctgttcacgttgaagtgacccggaatgtagaagtacggcaggttccagtagcgacccacgtcgatagtgatgctcaagccacccagactgtaaccaaacagactcgccaacagcgccggacgcaccagcggatggtattgcccacggttaaagacgtataccgcccacgccagcgcccagccgccacaggcaaagccggtgccaatcagcaggtcaaacgcgatccacacgccccacgggaagccgccgttcaggtcagagacagagcccagaccgaacaccagacgcttcacaatcaggagcatacagatgacgattaacggtccaaaaatcatgaccggtttactgatgattttgccgcccagcggttgtggatcatgactcatgatcgtctcctccgtcgtgattattcaactctcatgatcgtctcctccgtcgtgatggtcgtttttggtgttgcgacgaaccagcacggttaagcccgccagcacagccagtggtagcatcatgcctttatacagggtgtgttgaatattttcggaacgcgcaccggtagaaagatcgtccagtttcggcaggtcgagattttcataaggcacacccgtcagtaccagaacctgagtaccgccgccctctttctcgccgtacagatgcggataatatttcggcaccgtatgcaggtaagtgtcgccagatttcagcgtctgacgcggatagtggtattcgctgccaggcttcagcgccagacgttttttcgcctccgccatcagctcttcacgcgtaccgaaaatcaccgcgcccgccgggcacacttctacgcagccaggtagaccgcctttatcgagacgttccacacctttctggttgcacagctcgcacttatgcagcgcaccaaacgggttgttgtagtcgtacttcggcacgttgtacggacaggcgaccatgcagtaacggcagccggtgcacacatctttgtcgtaatggacaatgccggttttcggatcttttttcagtgcagagaccgggcacacagagacacagttcggatcgacgcagtgcatacactgtttcttaatgtacgcgtagccgttctcctcctggtctttgttgacccctgtgccgctggtccacacctgaatgatgttattggtatacgggctcagtttgtcgttgttgctccaggtctgttccccttgcgggttacgttcagggaaattgatatcctgacacttggtgacgcaagcctggcagcctacgcacaaggtgctgtcgtacaacatccccaggcttcccggaattggcgggcggttttcagcagccgcatgactgacagacggcagcgcgcccgtcagcaatgccccgcaggaggctgctttaataaaattacgtctgttcacggttattctccccgactgtcagcgttatctttcttttgctgacgacccagttcacgcaccgccatcacgctgacaccggcaaccaacccaaccacaccgccgagcaaaccaatagcgcctgcagagacgttgccgccctctttagcgttaacatccggtttctgactacgcggagtttgattttcgacgttggcaagctgatggatgcctttatggaagccgataccttcttcgttacagccatagcaagggtgaccaatcgccaccggccacacaccgccaacatcgcagaattgcagcgtactgcagttgccgtaagtttctggccctttacagccgaggtggtacaggcaccagccttcgcggtggccttcatcaccgaactctttggcaaaacgaccagcatcgaagtgcgggcgacgttcgcagtgttcgtgaatcagacggccataggcgaaggtcggacggtttttgtcatccagtttcggcggtttgccgtaagtgatgatgtgcgcaacggtcgcgaggaagttgtgcgggttcggcgggcagcccggaatattgataacggttttgcctggcagaacttcttgcaggctgactgcgccagttgggttaactccagctgcggcaacaccgccccacgcagagcaggaaccgatagcgataatggctgctgcgccttccgccgctttgcggatgtgatccacaatcggctcaccggcaaccatgcaataaataccgttatcttttaatgggatggaaccatccaccactaacacatactgccctttgtacttctcgagagcgttatgtttgttctcttcgacctgatgaccgaaggcggcggaaagcacttcgtgatactccagagagatagtctccagtacgaggttttctaccgttggatgcgttgcacgaagcagagattccgtacaaccggtgcactcctgcgcgccaatccagataactggcggacgctgcgggttagtaacgctttcggccatctctgcagcggctttgctacttaaccccatggtggcggctaatgctgcacaaagcttcatgaaatcacgacggttaatgccgtgagaatggatgagggtgttatctccagtcatttatagttattccgttgcgaagacctggcatatattttgcctcaatcgcaaaatcaataatgcgatcgatgcgccatttaccacacatttattatggttatcgatatcatgatactgcggcggggcgctaaaacgaagggaagaagcattagtgtaattaattaaagcaagataatacgtatgtttgatcaattttcgaggcgataaccggccataaaaaagcgcaacgtagaacaggaattattctcacgaaagaaatccattaccatctctttatccagtccatagcggcgcgtcagaatacccgcttcccaggcgctaagctggcgatctccggtcttttcgtacatccggtgactgtagcctaatacaaaaccgcgtttataatcggcacagaattttgtcacattaaccgcactgtcggcatgcgttgcttttaatcccgccattaagcctttaccaaaatggttattcatcgttcacctcattcgctatatattgtcatatatagcgatattttaggcaaagaacgacttttgcgcacgctattttttcatgcttgtttaagacgtaatcccgtaagagataaacctatcaggagagatatttatcgaaccatttcagtgtcctttgccaggcaagatcggcggcagatttgtcataacggggcgtggaatcattatggaatccgtgattaacccccggatagatatacgcctcataaaccttattattggctttcaacgccgcctcgtaagcaggccagccctcgttgattcgggtgtccagttccgcgaagtggagtagtaaaggcgcttcaatcttcgccacatcggcagtgggtgcctgacgaccataaaacggcaccgcgcaggccagttccggatacgcgacagccgccgcgttgcttacgccaccgccatagcaaaatccggtaatacccactttgcctgtcgcttgcggatagcgttgcataaactcaattgcggcaaagaaatcattcatcagtttgttggatcaacctgctgttgcagctcacgacctttatcatcatttcccggataacctccaacggaacttaagccgtcaggtgccagggcgatataccccgccttcgccactcgccgtgccacatcttcgatatacggattcagtccacgattctcatgcaccaccactacggctggcgttttgccgctcatctttgcgggcttcaccagataaccccgcacctcgccgtgaccatttgggctaggatacgtgatgtactcagcaacaatttccgggtcggtaaactctacctgagtcgccagcgcataatttggcttgagcaaatcaaacaacgctaatgccgtcatcccgcctaccgcacttcgccgcaaggttgaggaactcacgtttcgagattttcccgtgagcgtaatagtcatagtaatccagcaactcttgtgggaaatctttggcggttaaacgcggcatcgttgcactcctcagttggtgtttttttaagcaaagcataagcacgtatttttgcccagtttttcgtcactctgtgagccagactacgggatacgcgctggcgaatcgctaaactagaaacattgtttcgaaattgaacggtggaaaggagaggtcatggtctggttagcgaatcccgaacgttacgggcagatgcaataccgctattgcggaaaaagtggtttacgcctgcccgcgttaagcctcggtttatggcacaatttcggtcacgttaacgcgctggaaagtcagcgtgcgatcctgcgtaaagcgtttgatttgggcattacgcactttgatttagccaacaattacgggccgcctccaggaagcgcagaagagaactttggtcgcctgctgcgggaggattttgccgcttatcgcgatgaactgattatctctaccaaggctggctacgatatgtggcccggcccttacggctctggcggtagtcgtaaatacctgctcgccagcctcgaccaaagcctgaagcgtatggggcttgagtatgtcgatatcttttactctcatcgcgtcgatgaaaatacgccgatggaagaaaccgcctctgcgctggctcatgcggtacaaagcggtaaggcgctgtatgtcgggatctcctcttacagcccagagcggacgcaaaaaatggtcgagttgctgcgcgagtggaaaattccgctgttaattcatcaacctagctacaatttactgaaccgctgggtggataaaagcggcctgctggataccctgcaaaataacggcgtgggctgtattgcctttactcctctggctcagggattgctgaccggaaaatatctcaacggcattccgcaagatagtcggatgcatcgtgaagggaataaagttcgtggtctgacaccgaaaatgcttaccgaagccaacctcaacagcctgcgcttattgaatgaaatggcacagcagcgtggacaaagtatggcgcaaatggcgttaagctggttgctgaaagatgatcgcgtgacgagcgtattgattggtgccagccgcgcggagcaactagaggagaacgtgcaggcgctgaataatctgacatttagcaccaaggagctggcgcagattgatcagcatatcgccgatggcgagctgaatctgtggcaggcgtcttccgataaatgacctgttaataacgggcgcgcgaaccgcgcccgaatcagatcagtgattatgacgagtcagtcggtcaagatagcccatcacaaatgcagaaagcacaaacgtcagatggataatgacgtaccacatcagtttgttatccgggacatttttcgcatccataaagacgcgcagtaagtgaatggaagaaattgccacaatgctcgctgctactttgtttttcaggctcgttgcgtccattttccccagccagttcagcttctctttgttctcggagatatccagctgactgacgaaattctcataaccggaaaacatcaccatcaccagcaaaccgccaaccagcgtcatatccaccaggctcagcaacacgaggatcaaatcactttccgccatgctgaagatattcggcagtacgtgaataatctcctggaagaacttcagcgccagggcaactaacgccaggctaaggccaaagtacacgggggcaagcagccagcgagaagcatacattgcattttcaagaaaacgttccatacattcctgtcgtgtagttaaaacgggcaacagtatatcgcaattgagtaaacagcacgcaacagcaaatcaacatatacgttaaacctttgtcgcataattctgaggtttagggatcttcctggttcccttatcaacgcatcgagaacgtctacccttaaaggacgttgaacctgaagggagaaaaacgatgtctcatttaaaagacccgaccacgcagtattacactggtgaatatcccaaacagaaacaaccgacgccaggcatccaggcgaagatgacaccggtaccggattgcggcgagaaaacctatgttggtagcggtcgcctgaaagatcgtaaagcactggtgacagggggcgattccggaataggtcgcgctgccgccatcgcttacgcgcgtgaaggggctgacgtggcgatcagttatcttcccgtggaagaagaagacgctcaggatgtgaaaaagatcattgaagaatgcggacgcaaagccgttctgctgccaggcgatttaagcgatgagaaatttgcccgtagcctggttcacgaagcgcacaaggcgttaggcgggctggatattatggcgctggtcgccgggaaacaggttgccattccggatattgcagacctcaccagcgaacagtttcaaaagacctttgccattaacgttttcgcgctgttctggctaacccaggaagcgatccccctgctaccgaaaggtgcaagtatcatcaccactagcagtatccaggcataccagccaagtccgcatttactggactatgcggctacgaaggcggcgattctgaactacagccgtggcttggcaaaacaggtcgcggagaaaggtattcgggtgaatattgtcgcgccaggcccgatctggacagcactgcaaatttccggcggacaaacgcaggataagatcccgcagtttggtcagcaaacgccgatgaaacgtgcggggcaaccggcggaactggcccctgtatatgtttatctggcaagtcaggagagcagctacgtcaccgcagaagtgcacggcgtgtgcggcggcgagcatttaggttaaaaaaatgcccggttgtgaaaagcaaccgggcatcattgtgaattcactcttacctgatgtggcgaaaacgccttatccgcctacaaacgcatgaagattcaacatgttgcaatagattttgtaggcctgataagcgtagcgcatcaggcattgagcacctaatgccggatgcgtcgtgaacgccttatccggcctacaaacgcacgaagattcaacatgttgcaatagattttgtaggcctgatgagcgtagcgcatcaggcaattctactttacttcgctttggcggtttcttcgccgaccagacctatcttcaggtaacccgcctgatgcagcgtatccattaccttcatcaacgtctcgtaatcgacggttttgtccgctcggaagaagatggtggtgtctttcttgccttcggttaacgcattcaacgccgtaatcattgtttcatcggtgaccggatcgttaccgataaacatgctgttgtctgccttcacgctcagataaaccggtttttccgggcgcggctgcggcgtgctggtagaagcaggcaagttcaccttcacatctaccgtcgctaacggtgccgccaccataaagataatcagcagaaccaacatcacgtcgataaacggcgtcacgttgatatcatgcatttcgccgttatcgtcgaggttttcgttaagatgcattgccatcggatattatcctgcgcgtaatttttgtgcgacacgaaccggatgcgcagcggcgctggcttccagatccaggtcacggctttgcagcaacaatacctgcgctgcaacatcacccagcatcgctttaaagccgccaatctggcgtgcaaatacgttatagataacgaccgcaggaatcgctgccacgaggccgattgccgttgctaacagagcttctgcgatacccggcgcaacgactgccaggttagtggtctgcgtttgcgcgataccaataaagctgttcatgatgccccagaccgtaccaaacagaccaacgaacggagaaatcgcgccgatggttgccagatagccgttaccgcggcccatttgacgacccactgcggcgacccgacgctccagacggaagctggtacgttctttaataccttcgttatcgtcgctgccttcactcagttccagctcattctgcgcttcattgagcaaatgcaggcttaagcttttgctaccaaaatcagcggcgatatcgttggcctggtttaaggaacgcgcttcagccagcagttgctgctcgcgcttaaggcgacgcttctgattgaagaactctacgctcttactgaagaagattgcccaggtgactacggaggccaaaataagcccaatcatcacgcacttaacgacaatatcggcgtgctgatacataccccagacggaaaggtccgtctgcattaaattattacccactgtgtatctccaggacgcaagtcacaaaatctgcgcataataatatcaaaacgacgtcgaattgatagtcgttctcattactatttgcatactgccgtacctttgctttcttttccttgcgtttacgcagtaaaaaagtcaccagcacgccatttgcgaaaattttctgctttatgccaattcttcaggatgcgcccgcgaatattcatgctagtttagacatccagacgtataaaaacaggaatcccgacatggcggacaaaaagcttgatactcaactggtgaatgcaggacgcagcaaaaaatacactctcggcgcggtaaatagcgtgattcagcgcgcttctagcctggtctttgacagtgtagaagccaaaaaacacgcgacacgtaatcgcgccaatggagagttgttctatggacggcgcggaacgttaacccatttctccttacaacaagcgatgtgtgaactggaaggtggcgcaggctgcgtgctatttccctgcggggcggcagcggttgctaattccattcttgcttttatcgaacagggcgatcatgtgttgatgaccaacaccgcctatgaaccgagtcaggatttctgtagcaaaatcctcagcaaactgggcgtaacgacaagttggtttgatccgctgattggtgccgatatcgttaagcatctgcagccaaacactaaaatcgtgtttctggaaagcccaggctccatcaccatggaagtccacgacgttccggcgattgttgccgccgtacgcagtgtggtgccggatgccatcattatgatcgacaacacctgggcagccggtgtgctgtttaaggcgctggattttggcatcgatgtttctattcaagccgccaccaaatatctggttgggcatagtgatgcgatgattggcactgccgtgtgcaatgcccgttgctgggagcagctacgggaaaatgcctatctgatgggccagatggtcgatgccgataccgcctatataaccagccgtggcctgcgcacattaggtgtgcgtttgcgtcaacatcatgaaagcagtctgaaagtggctgaatggctggcagaacatccgcaagttgcgcgagttaaccaccctgctctgcctggcagtaaaggtcacgaattctggaaacgagactttacaggcagcagcgggctattttcctttgtgcttaagaaaaaactcaataatgaagagctggcgaactatctggataacttcagtttattcagcatggcctacagctggggcgggtatgaaagcttgatcctggcaaatcaaccagaacatatcgccgccattcgcccacaaggcgagatcgattttagcgggaccttgattcgcctgcatattggtctggaagatgtcgacgatctgattgccgatctggacgccggttttgcgcgaattgtataacattgccacttttggacaattttgcagacattttattgtgaaaagtcttaaattgttgcgtccgggatcaaggcgtcccggacgattcaggagtacaataggcagataaaggcttaaacgctgttccacaggaaagtccatggctgttattcaagatatcatcgctgcgctctggcaacacgactttgccgcgctggcggatcctcatattgttagcgttgtttactttgtcatgtttgccacgctgtttttagaaaacggcctgctgcccgccagttttttgccaggcgacagcttgttgatactggcaggcgcattgattgcccagggggttatggattttctgcctacgattgcgattctgaccgccgcagcaagtctgggctgctggctaagttatattcaggggcgctggttagggaataccaaaacggtgaaaggctggctggcacagcttcctgctaaatatcaccagcgcgccacctgcatgtttgaccgccacggtctgctggcgctgctggctggacgttttcttgcatttgtccgtacgctgctgccaaccatggcgggaatttccggtctgccaaaccgccgcttccagtttttcaactggttaagtggattgctgtgggtcagcgtggtaaccagttttggctatgccttaagtatgattccgttcgttaaacgccatgaagatcaggtaatgacgttcctgatgatcctgccaattgccttgttaaccgctggcttgttaggcacgctgtttgtggtgattaaaaaaaaatactgtaacgcctgacgattttccccgttcccggttgctgtaccgggaacgtatttaattcccctgcatcgcccgcattcttgccgcatcttcccccggcgtcacaccgaagtaacgtttaaactcacggctaaattggcttgcgctttcatagccgacgcgcatcgctgctgcgctggccttcatgccgtcatggatgatcatcatccgcgccttatgcagacggtaattcttcaaatactgcaacgggctggtactggtgacagacttaaaattatggtggaacgcgcttacgctcatgttggcttctgccgccagttgctcgacgctcaggttttcggtgtatttattctcaatccgtttcagcacgcggctaatcagactgaagtgagtctggcgactgaccagcgccagtaacgcgccgccgcaaggtccggtcagcacgtagtacagaatttcgcggatgatctgtttgccgagaatacgcgcatccagtggtcgctccatcacgtcgagtaaccgctccgccgcgcataaaatctcttcacttaacgtggcggagttaatcccgctggctgccatgctcggctggaaatgctcatcttcgccaatgtccatcaacagttcctgtaactgcaaaatatcgacattgagacgcaaccctgccagcggcacctcactcgtggcataggtttcgcactcaaacggcaacggcaccgtcagcagcaggtattcattggcatcataacgaaacacgcgttcattgatataaccgattttatgcccggaaaagagaattatgatgccaggctcgtacatcaccggtgtacgtgcgaaaggcgtctcgccatacaacaaacgcacatcgggcaacagtccactcaaactattttctttatttttcagtttattaactttatccgccagcaagcggcaaatctcttcacgtttcatatcgcgtaatttcttaggaataatgcggcaattactttgtgcgcaattttgtagcatttctccagcactctggagaaataggcaagacattggcagaaatgagcattgagagccagggcgctggcgatcacaatgaaaaacatcaggcagatcgttctctgccctcatattggcccagcaaagggagcaagtaatgaacaactttaatctgcacaccccaacccgcattctgtttggtaaaggcgcaatcgctggtttacgcgaacaaattcctcacgatgctcgcgtattgattacctacggcggcggcagcgtgaaaaaaaccggcgttctcgatcaagttctggatgccctgaaaggcatggacgtgctggaatttggcggtattgagccaaacccggcttatgaaacgctgatgaacgccgtgaaactggttcgcgaacagaaagtgactttcctgctggcggttggcggcggttctgtactggacggcaccaaatttatcgccgcagcggctaactatccggaaaatatcgatccgtggcacattctgcaaacgggcggtaaagagattaaaagcgccatcccgatgggctgtgtgctgacgctgccagcaaccggtagtgaatccaacgcaggcgcggtgatctcccgtaaaaccacaggcgacaagcaggcgttccattctgcccatgttcagccggtatttgccgtgctcgatccggtttatacctacaccctgccgccgcgtcaggtggctaacggcgtagtggacgcctttgtacacaccgtggaacagtatgttaccaaaccggttgatgccaaaattcaggaccgtttcgcagaaggcattttgctgacgctaatcgaagatggtccgaaagccctgaaagagccagaaaactacgatgtgcgcgccaacgtcatgtgggcggcgactcaggcgctgaacggtttgattggcgctggcgtaccgcaggactgggcaacgcatatgctgggccacgaactgactgcgatgcacggtctggatcacgcgcaaacactggctatcgtcctgcctgcactgtggaatgaaaaacgcgataccaagcgcgctaagctgctgcaatatgctgaacgcgtctggaacatcactgaaggttccgatgatgagcgtattgacgccgcgattgccgcaacccgcaatttctttgagcaattaggcgtgccgacccacctctccgactacggtctggacggcagctccatcccggctttgctgaaaaaactggaagagcacggcatgacccaactgggcgaaaatcatgacattacgttggatgtcagccgccgtatatacgaagccgcccgctaagctttttacgcctcaaactttcgttttcgggcatttcgtccagacttaagttcacaacacctcaccggagcctgctccggtgagttcatataaaggaggaacgtatggctaatccaaccgttattaagctacaggatggcaatgtcatgccccagctgggactgggcgtctggcaagcaagtaatgaggaagtaatcaccgccattcaaaaagcgttagaagtgggttatcgcagcattgataccgccgcggcctacaagaacgaagaaggtgtcggcaaagccctgaaaaatgccagtgtcaacagagaagaactgttcatcaccactaagctgtggaacgacgaccacaagcgcccccgcgaagccctgctcgacagcctgaaaaaactccagcttgattatatcgacctctacttaatgcactggcccgttcccgctatcgaccattatgtcgaagcatggaaaggcatgatcgaattgcaaaaagagggattaatcaaaagcatcggcgtgtgcaacttccagatccatcacctgcaacgcctgattgatgaaactggcgtgacgcctgtgataaaccagatcgaacttcatccgctgatgcaacaacgccagctacacgcctggaacgcgacacacaaaatccagaccgaatcctggagcccattagcgcaaggagggaaaggcgttttcgatcagaaagtcattcgcgatctggcagataaatacggcaaaaccccggcgcagattgttatccgctggcatctggatagcggcctggtggtgatcccgaaaagcgtcacacctagtcgtattgccgaaaactttgatgtctgggatttccgtctcgacaaagacgaactcggcgaaattgcaaaactcgatcagggcaagcgtctcggtcccgatcctgaccagttcggcggctaacatgcaaattctcccggtggcggtaatgttccgctaccggacttttcagaaatcatttattcccctcgcgtcccgcccgttgttactcttccttgttcaggaatgccaaatataaggacatcatcatgcagagccggaagctcttaaaagaacaactcatctatatccgggataaacgcaacggagaggtgaaaaacagatgaaaataatacttctgtttttagcagccctggcaagttttaccgtacacgcacagccccccagtcagaccgtagaacaaacagtccggcatatttatcagaactataaaagtgatgccactgccccttattttggtgaaaccggagagcgggcgataacttctgcgcgtattcaacaggcgcttaccctgaacgacaatcttacgctgccgggcaatattggctggctggattatgatccggtttgtgattgtcaggattttggcgatctggtgctagaaagcgttgcgataacccaaactgacgccgatcatgccgatgccgttgtgcgctttcgtatctttaaagatgataaagaaaagaccacgcagacactgaaaatggtggcggaaaatggtcgttgggtcattgacgatattgtcagcaatcatggcagcgtcttacaagcagttaatagcgagaatgaaaaaacgctggccgctttagctagcttgcaaaaagaacagccggaagcctttgttgccgaactctttgaacatattgctgattatagctggccgtggacgtgggtggtttccgactcttaccgccaggcggttaatgccttctataaaaccaccttcaagacggccaataatcccgatgaagatatgcaaatagaacggcaatttatttacgacaatccgatctgttttggcgaagagagcctatttagtcgcgttgatgaaattcgagtcctggagaaaaccgccgattccgcccgcattcatgttcgttttacgctgaccaatggcaacaacgaagagcaagaactggttttacagcggcgcgaaggcaagtgggaaatcgctgattttatccgcccgaacagcggcagcctacttaagcagattgaggcaaaaactgccgccagattaaagcaatgagctgaattaaataacaattagccggaacaataaataaaagggaacactatatgaaaacgattttcaccgtgggagctgttgttctggcaacctgcttgctcagtggctgcgtcaatgagcaaaaggtcaatcagctggcgagcaatgtgcaaacattaaatgccaaaatcgcccggcttgagcaggatatgaaagcactacgcccacaaatctatgctgccaaatccgaagctaacagagccaatacgcgtcttgatgctcaggactattttgattgcctgcgctgcttgcgtatgtacgcagaatgataaaaaaatccccggtagcgtgtcagttgccggggatattttttaacgtccaaccgccgctttaggccgtttcttcgcaccagcattcaccggacgagattgcgtagagctcgctttttttgccgtagcaggcgtctgacgctgggtcgccatcggcgtatgtttcgtcaacgccggacgggtattgcggttctggcgacgagcttcacgcatctcttcaatggttggcgcaggcactaagcaatcgcgacggctgccaatcagatgctttttgcccatcgcttccagcgcctggcggattaacggccagtttgccggatcgtggtaacgcaacaacgctttatgcaaacgacgctgtttgtcgcccttcggtacgaagacgtcttcgctcttataaccaatcttcgccagcgggtttttcccggtgtaatacatggtggtactgttcgccagcgggctcggatagaagttctgcacctggtcgaggcggaagcggtgctttttcagccacagcgccagattcaccatatcttcatcacgcgtaccggggtgcgcggagatgaaataggggatcagatactgctctttacctgcctgtttactgtaagtatcgaacagctctttaaagcggtcatagctgcccatgcccggcttcatcatcttgcttaacggcccttcttcggtatgttccggggcaatcttcagataaccgccgacgtgatgggtcgccagttctttgatatagcgcggatcttctacggctatgtcataacgcacaccagaggcaatcaggatctttttaatgcctttcagatcacgcgcacggcgatagaggttgatcgttggttcgtggttcgtgtccatgtgcggacaaatatccggataaacgcagctcaaacggcgacaagtttgttcagcgcgtgggcttttgcagcgcaacatatacatgttggcagttggcccaccaagatcggaaatcacgcccgtaaaacctggaacggtgtcgcggatcgcttcgatctcattaatgatgctatcttcggaacggctctgaataatgcgcccttcgtgctcggtgatagaacagaaagagcagccgccaaagcagccacgcataatgttgacgctaaaacggatcatttcgtaagccggaatacgggcattgccataggccggatgtggcacgcgcttgtatggcagcgcaaaaacgctgtccatctcttcggtagaaagcggaatagcaggcgggttgatccacacatagcggtcgccgtgtttttgcatcaatgcgcgggcacagcctgggttggtttcgtggtgcagaatacggctagcatgggcgtacagcactttatcgcccttcactttctcgaaagaaggcagcaacacgtaggttttttcccacggtttcgggcgcggtggctgcacggttacggctttggcttcctgctttttcggtgccaccggtttgttatccgcgcacggcaaatcttcaccatacggatgcgggattgggtcgatttttccaggggtatcaagacgggtggaatccacgccgctccagccaggcagcgcctctttcacgataatcgcggtattacgcacatcgcggatttcactaattggctcgcccatcgccagacgatgcgccacttccaccagcggacgctcaccgttaccaaacatcagcatgtcggctttgctatccaccagcacggaacggcgcacggtatcggaccagtaatcataatgcgcggtacggcgcagactagcctcaataccgccgaggatcaccggtacatctttccacgcctctttacaacgctgggtataaaccagtgtggcgcgatccgggcgcttacccgcgacgttatccggcgtgtaggcatcgtcatgacgtaaacggcgatcggcggtataacggttgatcatgctatccatgttgccagcagtaacaccgaaaaacagattcggtttacccagacgcataaagtcgtctttgctgctccagtccggctgggcgatgatcccgacgcgaaagccctgcgcttccagcatacgaccgcaaatcgccatcccgaagcttgggtgatcgacatacgcgtcgccagtaaccaaaatgatgtcgcagctatcccagccaagttgatccatctcttcacgagacatcggcaaaaacggtgccggtccaaaacaggcggcccagtactgcggccaggagaacaggtcgcgatccggttggatcagggagatagagctcattttgcttccagaaatgataaaaaaataatcaaaggccggggattataagccggaacgaaagagaaatcgaaaggtattccatactcgccctcctcgggcgagtatgaagattacggtaccggattgaccaacagttgcccaatgctgccacggtccgccatttccagcgtctgactgttgaagtagaacgggaagtgcgcccaggaaggctgaccgaaataaacaagcagctccacttgtccgtcaacccaaacggtatctttccagcctctgtcttccgggaacggcatcgcgccattcacgttacggatctggaacattacgccttcaatatggaacgcttgcggctcgtccgcgcgtaccgtccagcgttcccacgttccttgctgcgcggtgacatcaatacggttgacgtcccacagctgtccattaatacccgggtcatcacccagactgatatcgcgactgcgaattgggctaccagccatgatttcagttggcagcaagcgcatcggaagactgtctgtgaccagcggcagaaggccggttgggcgcagcgttagcaccagggtagaaaccagaatactggatggctcaaagaagccacgaatacgatcaacaatgctcgccgcttcgccacaggtgatgctcacttcatcgccgttgctcatatccaccagaatctcgcggcgctcgcccggtgccaggctaagttgcttcacgcttacaggagcaggcaggaatccctgatcgccagaaatcacatgtaacgggcgaccatcgttcatctgtagttgatagcgacgagagttgctcgcgttcagcagtcgcaagcgcacccagccacggctgacttcaacgtacgggctttgtacaccgttaaccagcagcgtatcaccaacaaagccgccgcttcccggttcgttgtattctggcgtaccaaagttatccagccgtttatcctggataatgaccggaaaatcatccacaccataatggttggggataggcaggctcttgctgacttcatcttccaccagccacattccggcaaggccgttatagacctgctgagccgtgcggttgggagtattggcgtgataccacagagtagctgcgttctggcgaatgggcagtacgggtgcccagtcagcgtttgggctcatcatccgtgccggaccgcccatcagcgggcctggtacctgtagcccggccaccgtcatactgacattttctgtcaggcggttgctgtaaataagcttaacatcgtcgcccttccagacgcggatagtcggccccaggtaacgaccattgattccccagacgctcgcgcgtgtccctggcgtaaaactccagtgcgcacgttgtacagtcataaacagcggttgcccacggcgagattcaagtagcggcggaacgggtagcggttgctgttgcccggctgcgctggccttcaggggaacagcgcctgcacaaagtgcaatcccgcttgcctgaatgaactgacgccgactgagactcatatttgctccatgtaaaactggctaaagtaataccgtgcaggaaagtgttccccgcaaaaatacagattgccgacttaaacttttccggcggcttcgcgttctgcgacttctttatcgagctcggcgattttttgttccattatgctacgacaatgggcagccagctcacgaacctgatctttgccatactgactgacgtcaattggcggcagcatttcgacaatcaccagaccgttgtgcagtcgattaagattaatcttattgctagttgtagagacgcacacgggaataatcgggacgcccgccgcaattgccgcgtgaaatgctccagtcttgaacggtagcaggccgcgaccacggctgcgggttccttccgggaacatccagatggaaatacggcgttttttgaagtgattcactacttccgcaatggtgccgtgagctttagtgcgattgtttctgtcgatcaataagttgccggttaaccagtacaactgcccgaagaaggggatccacagcaagctctttttacctaccgtcaccgtcggcggttgcacgatgttgcttgctgtcaccatgtcatagttgttctggtggttagcgatatagatagcattgccgtagctttcagcgtctgtaggtttacggcactcaactttcaggccaaacagcggcgcaagacggccaaacatatgcccaaaggtggccacatgtttcgggttacgcgggctgaaaaggcagtaaatggagccgaatacacagactaagatgctgtaaatcacggtaataataagacgaaagatatatagcataacaccctctgaaggtctgagagactggcattgtacgtcacctgaaatcaggttagggcattgttaaaagccgctctctggaaaagcgtattgttaatcgcaacgcatgaataaacaacggtttcaagggaatttttatcgtttccgggggttgaatacgctgccggatgacgacttaacgtttcatccggcgttccttgcaagcgggaggaaacagcgccctccccggcatattactcttcgctatcaccgctgctggcacggcgaggagagtcgatctcaacacgatcgatacgctgcaaaccgcgcatcaacgtaccgcggcgtccacgttcgccagtgactttctgtaactcttccgggcgcagtttaattttgcgtttcccaacatgaatggtcagcgtgctttgcggcggcagaacgtacaattgcgccagaccatcttctccacgcgcggcttctgcgcttggaatgttgataatcttgttgcctttgcccttgctcagctgcggcagatcacttaccgggaacatcaacatacggcctgcctgagtgattgccagcagcatatcggaagcatcttcaatcaccaccggcggcataacatgggcattttccggtaaggtgatcaaagccttacctgcacggttacgcgccaccagatcgttaaaggtgcagacgaaaccgtaacccgcatcggaagccatcagcagtttctgatcgtcgctttccatcagcatatggtcaacggtcgccccaggcggcaacgttaatttgccggtgagcggctcgccctgaccacgcgcgctcggcagcgtaatcgggtcaatggcatagctacgaccggtggaatcaacaaacactaccggttggttgctcttacctttcaccgccgctttgaagctatcacccgctttataattcaggcccggcgcgtcgatatcatggcctttagcgctgcgtacccagcccatctggctcagcacaatggtgacaggttcagacggcagcatgtcgtgctcgctcatcgctttcgcttcttcgcgttcctgcaacgggctacgacgatcgtcaccgtaggcttgcgcgtctgcctgcagttctttcttcagcaggttattcattttacgctcggaagccaaaatgccctgcaactggtcgcgctctttttccagttcactctgctcaccgcgaatcttcatctcttccagtttggcaagatgacgcagtttcagttcgaggatcgcttccgcctgggtttccgtaaggccaaaccggctcatcagcgccggtttcggttcatcttcattacgaatgatctcaatcacttcgtcgatattgagaaacgccaccagcaaaccttcgaggatatgcaggcgcttgaggactttctccagacgatagttcagtcggcggcgcacggtatcgcggcggaacaccagccattcggagaggatttccagcaggtttttcaccgccggacgaccatccagaccgatcatattaaggttaatacgatagctcttttccagatcggtggtagcgaagaggtggttcatcacctgatccatatccacgcggttggaacgcggcacaatcaccaggcgggtcgggttctcgtggtcagattcatcgcgcagatcgtcaaccatcggcagctttttgttgcgcatttgcgcagcaatttgctccagtacgcgcgcaccactaacctgatgcggcaatgcgctgataaccaccgcgccatcttctttcttccacaccgcgcgcatacgcacactaccacgtccgttctcgtagattttacggatctcggcgcggctagtgataatttccgcttcagtcggataatccggcccctgcacgatatccagcagctgatcgagcgtggttttcggctggtcgattaatgcgattgccgcctgagccacttcacgcaggttatgcggtggaatatcggtcgccatgccgacggcaataccggtggtgccgttaagcaaaatgtttggcagacgggcaggtagcattttcggctcctgcaaagtgccgtcgaagtttggcacccagtcagccgtcccctgccccagctcgctcaatagcagctcggaatatttgctcaaccgggattcggtgtaacgcattgccgcgaagcttttcggatcgtccggcgcgccccagttcccctgaccatcaaccagcggataacggtaagagaacggttgcgccatcaggaccatcgcttcataacaggcgctatcgccgtgcggatggtatttacccagtacgtcaccgacggtacgggcgctttttttaaatttggcgctggcattcaggcccagttcagacatcgcatacacaatgcggcgctgaacaggtttcagaccatcaccaataaacggcaacgcacggtccatgatcacgtacatggagtagtttaagtaggcgttttccgtaaattcatgtagcgcaaggcgctctgccatatcgctcattaattctgattcctcaacttattcgccagccttcaaaggggcaatattgccggagatactacattatctgccgcgtcgagtcacaggagatcaacgtgaatagcgccgccggacgtgctccgacggcgataaaggcatcaatgtgccttgatatacaactctttgctgtagacataatcctggggattatgcagcggaaaaccgccaacgtagggtttaagcagtttgattaacggctgatagtagataggaatcagcggtgcctgttggttgatgatcacttctgcctgctgatacaacgcattacgctttgtcgcatcagtgatctgcgtggcctggtttagtaaggcgtcatactgcgcatttttccagtgaccgacgttttcttcactatcgcttttgagcgtgttcaggaagctggaagcatcattgtacgtcgcatcccagctctgccgagacagcatgaaatcaccggctcgtcgggcatcaagataggttttccactccattgtgcgcagcgtcacctgtgcacccagccattttttccattcggaagacaacgctatcgcggtcttttcatgcagatcgtacttgttgtagaacagctcaaagcgtagcggatgagaggcgtcgtatcccgcctgtttcagcaaggcttttgccatcgcgacgcgctcactcattggcttttgcagttcatcgaacgtcgtcgcgctaaagccttttacctctggcggcgtcagcgtggttgcgggcgttctcaaccccagtaccttttgcgcaataagctgtcgatcaaccgtaagatatagcgcccgacgcactcgcacatcgttaaatggcggtttctcaaggttgaagttgtaatattcgctgttcagacgcggaataattcgtagctcgccaggcagacttttttcaatggcgggaatttgctgcgccggaacccaggtgagatcgacctctcccgcgcgatagcggttatagccggtgacgctattatctagcgccagatactcaacctgttgcaatactgtatgttgcgcatcgcggtactttggatttttgcgtgcagtaatcttttcgttaactacccactgatcaagcacaaaggcaccgttgtaaaccatgttctctggcttactccagctatcgccatgtttagcgatgacatgatgaggaaccgggaacagcgtcggccaggcgagcatcgtcgtgaaccaaggaaccggctgctcaagcgtaacttcaagagtacgatcatccgtcgctttgacacccaggcttgtaacatctgctttacccgcaacaatagctgcggcattgttaatgtgcgcctgtgccagatagccagcaaaagggcttgccgttttcgggtcaaccgcgcgctgccagccgaggacaaaatcctctgccgtcagaggctgaccgtcggaccactgcaaaccgctacgcagatggaaaatatagcgcttgccgccgtccagtatctcccagcgttcagcctgagcgggctgcacctggccttcaccgtccatccataccagaccttcaaacagatccagcacaatctgcgcggcagtattctcctccaccttttgcgggtcgagcgtacctgggtcgctatgattgttgtaacgaaagacttgttgcggggcgagcggtgtgttggcgggaacgtcagcagcgtagagaggagccgcacttaccaggctgaccagccataataaatttcgcgtatacatggtattccttaccggagaaattataagcccaacaacaatacgcctgtggcattgttcgctcaaacttatcgcgagtgatttggctcacactccggtaaagaaaaaagcgagttgcccccgcttttccattaattaacggatttcattcaatagttctggatgcttatccagaacacgtaaaagtttgattgtggaaggatgaggttgggcattgcctttttcgtaacggctaaacgcatttacacctcccccaaaaatttcgcttgcctctttttgggtaagagagagcttttttcgaaccttcactataaattcaggtgccactgtttcggcattcacgctagcccgaaatgcctttacttgcgccatgaaagcatcactctcttctttattcatgatgctctcttcgcaatggacacaatataaaccgtggatacctttcaatactgtttttcgtccacggaaggtgtatggaatatctttaatgccagaaaccatttctccctggtggcaaaccggacatttcatattacttctccttaaagctgacgatcagtacgtcatgaattaccgtaattttaagataaacctggcctgtaacaagcctgggtctgtaaacatcctgccagatagtatgatcagagtaggtggtcatgcttttataaaagtcgctctcacttaatccaatgataacattacacataccatcaaaatccaaacctaactcatctgcatttaacagggcactacgtgttgtacgaacttgcccggcattgacaagttttttaacctgactcaaacgtgtatgtggtgtgcgtttttccataacccccgcctccctgttactttagttataacctaaaaggttaattacagcaatgaaaaagcacctaaaaggttagttagatgtacggagatagtgaccacacaaaacgtattctttaaggaaagtgattgaccatataagaaagtggcgcattagtagcgccagtttgaagcaggaatttataagggaagctggagtcaggcatcacgccaacggcacataaacatccgtttccagtcgctgctctgtcaccccttcggcaagattggtgtagtgaaacagaatcggtgctttacgcattttctcgccgcttgcaggcagccagtggcgaatgatgccccataccgtgtgactaatatcgtccagctcgccaacgtggcgggccacggcataacgtccaccggtaagttcaccattgctcacaccataacgattatcgggaatcggttcgctaacgctgccgcagatatcaaagcgaaacgcttccggtgcggtggtggcagggtcgtcccaggcgacgccaaaagtctggctttggttaacaggagaaagcccgtctctttacgccacatgataaatttcgccacgctgtagttgagcaattcagggctacagcggtgcggcaacatcgccacaggtatacttgggaaatcgataatgtttacatccagtgtcaggtttgtcattttgcctccctgcgaaattattcccgggaacgcgtcccgggagcggtaacaattacggatttactttgcggatctgtttgacgtcaatttcaacagaattccagtctttatcgacttcaccctgaatctcaaccgtatctttcggcgtcaccgtcacgccgttccagcgtttgtggtcgatatcaacattgatagtaccgctggcatctttgaacacgtagagatcgtcagagatgcgttcaacgatattgccgcgcagggttacccaggtgtcgtcacgcagggattttgcgctttctacagtcgttacgctgccgttcggcccctggaatcctccggcctgactttgcgttgcgcttgggccagaaaaaccgccctgctctgctgccatcaccggtgcgctgcacagggccattactgcgattactgctgcgaattttttcatgtttattactccctttaatgtctgtttccgagcatttaacaagatagtccttaacaacttcttaagggaaaaaaataaaatttagtgctgtacagagcgcgttacaacacggtttactggcagcaaatacggttatcgcagggatgaaaaaatgcgaattttactgatagaagatgacatgctgattggcgacggcatcaaaacgggccttagtaaaatgggttttagcgtcgactggtttacacaaggtcgtcagggaaaagaggcgctttatagcgcaccttatgatgcggtgatcctggatttaaccttaccaggcatggatggtcgcgatattttgcgcgaatggcgagaaaaaggtcagcgtgagccggtactgatcctgaccgcgcgcgatgcgctggcggaacgtgtagaagggctgcgtctgggagctgacgattatctgtgtaaaccttttgcgttgatagaagtcgccgccaggctggaagctctgatgcgccgaaccaacggccaggccagcaacgagctgcgccacggtaacgtcatgctcgaccccggcaaacgtatcgccacgctggctggcgaacccttaacactgaaaccaaaagaatttgccctgctggaattactgatgcgtaacgctggtcgggtactgagccgcaaactgattgaagagaaactgtatacctgggacgaagaggtcaccagtaatgccgttgaagtgcatgtgcatcatctgcgacgcaaactcggtagtgattttattcgtaccgtgcatggtattggttacacattaggtgagaaatgaaatttacccaacgtcttagtctgcgcgtcaggctgacgctaatctttttaattctggccagcgtgacctggctgctttccagctttgtcgcctggaaacaaacaacggataacgtcgatgaattgttcgacacccaactgatgctgtttgccaagcggttaagtacgctcgatctcaacgaaatcaacgcggcggatcgcatggcacagacgccaaatagattaaaacacggtcatgttgatgacgatgcgctgacctttgccatctttacccacgacggcagaatggtccttaatgatggcgataacggagaagatattccctatagctatcaacgggaaggttttgctgacgggcaactggtcggtgaagacgatccttggcgttttgtctggatgaccagtcctgatggcaaatatcgcatcgttgttggccaggaatgggaataccgtgaagacatggcgctggcgattgttgccgggcaattgatcccgtggctggtcgcactgccgattatgttaatcatcatgatggtactactgggtcgtgaactcgcgccgctgaacaaactggcgctggcactacgtatgcgtgaccctgacagcgaaaaaccactaaacgcgactggcgtacccagcgaagtgcggccactggttgagagcctaaatcaactgttcgcccgcacacatgcgatgatggttcgtgaacgacgctttacctccgacgcagctcacgaacttcgtagcccgttaacggcgctgaaagtgcaaaccgaagttgcgcagctctctgacgatgatccgcaggcgcggaaaaaagcactgctccaattacattccgggatcgatcgcgctactcgtctggttgatcaactgctcacgctaagccggctggacagtctggataaccttcaggacgtcgcggagatcccgcttgaagatctcctgcaaagcagcgtgatggatatttaccacacggcgcagcaggcgaaaattgacgtgcgactgacactcaatgcccacagcatcaaacgcaccgggcaaccgctattgctaagtttgttggtgcgaaatttgctggataacgccgtgcgctacagtccacagggcagcgtggtagacgtcacgctgaatgctgataatttcatcgtgagggataacggccccggtgtgacaccagaggcactggcgcgaattggcgaacgcttctatcgcccacccggacaaaccgctaccggcagcgggcttgggctaagcattgtccagcgaatcgccaaattgcatggcatgaatgttgaatttgggaatgcggaacaaggtggatttgaggcgaaggtaagctggtaacttctctgtctatgagagccgttaaaacgactctcatagattttattaatagcaaaatataaaccgtccccaaaaaagccaccaaccacaaaccagacaaataccgaggctgaatacatatacccaaaactcgaacatttcccgcataaagagttttcttaagataagaataataagtggcgtaagaagaaaaaatgctgcaatcattgcttgcaatatacgatcttcgccactaacggaaggtatactgcaaatatttcctccgctctcaagcatccagtcatacttattgaaagcaaaaaaagaatctattaaccaataagtaagcattatatatagcaatgcttcaaatattgttttaattttctgctttaacatatatcagtacgctcataaaaatccatttataattatcaacatgacacgttgatactttcatcttttacttattcaaagccatattttcaatccccaaaaaaaccgaaccaaacgtgtaaattattccggtgcgagtaagaattatgaggaatggctatcagtattgtcattttcagaaaatatttatcctgcatcggtgagtcagagtaagatcagacttttgctaaattcgcaaaagactttgcacattttgctaatttcaccgtaccgctctgtgacgtactatagtcggcaaacgtctcaccttgaggttaaaaaatgagcaacatcctgattatcaacggcgcgaaaaaattcgcccactccaatggtcaactgaacgacaccctgaccgaagtcgcggatggcacactgcgcgaccttgggcatgatgtccgcatcgttcgcgccgacagcgactacgatgtcaaagcggaagtacaaaactttctctgggctgatgtggtgatctggcagatgccaggctggtggatgggcgcgccgtggacagtgaaaaaatacattgatgatgtattcaccgaaggtcacgggacgctgtatgccagcgatggtcgtacccgcaaagatccgagcaaaaaatacggttccggcggcctggtacagggcaaaaaatatatgctttctctgacctggaacgcaccaatggaagccttcaccgaaaaagatcagttcttccacggcgttggcgttgacggtgtgtatctgccgttccataaagcaaaccaattcctcggtatggaaccgctgccgacatttatcgctaatgacgtgataaaaatgcctgatgttccccgctatactgaagaatatcgcaagcatcttgtggaaatttttggttaactagagctcaggctttagaaggagttaaccatgcttaccgtaatcgcagaaatccgtactcgtcctggtcaacatcaccgtcaggcggtattggatcagtttgctaaaatcgttccaaccgtactgaaagaagaaggttgccacggctatgcgccaatggtggattgcgcagctggcgtgagtttccagtctatggcaccggattctatcgtgatgattgagcagtgggaaagcatcgcgcatcttgaagcgcatctgcaaaccccgcacatgaaggcgtatagcgaagccgtaaaaggtgacgtgctggagatgaatatccgtattctgcagccagggatttaatcctgccttgtttgcccggccatcctgaccgggcaatgttctttcctttaaacctcaatctccgccatgtcgcctttctcttgcaaccagttgcggcgatcttcgctgcgtttcttcgccagcagcatatccatcatcgcgtcagtacgctgatcgtcttcatcatcgatagtcaactgcaccagacgacgagtgttcggatcaagcgtggtttcgcgcaattgcatcgggttcatttcccccagacctttaaaacgctggacgttcggcttgcctttcttgcgttttaattgctcaagtacgccctctttctcttcttccgtcagcgcgtaataaacctctttcccgagatcaatacggtagagcggtggcagtgcgacgtaaacgtgaccgtgtttcaccaacgcgcggaaatgttttacgaacaaagcgcagagcagcgtggcaatgtgcagaccatcagagtccgcatccgcgaggatacagattttgccataacgaagctggctcagatcgtcgctgtcaggatcgataccgatcgctacgctaatatcgtgcacttcctggctagccagcacttcgtcggaagagacttcccaggtgttaaggatcttacctttcagtggcatgatcgcctgatattcgcgatcgcgcgcctgcttggcagatccgcctgcggagtcaccttccacaaggaacagctcggtacggttaaggtcctgcgcggtacaatcagccagtttgccaagcaacgccgggccgctggtcagctttttacgcaccacttttttggccgcacgcatacggcgctgggcgctggaaatcgccatctccgccagcagttcagccgcctgaacgttctggttcagccacaggataaaggcatctttcaccacgccagaaacgaatgccgcgcattgacggctagagagacgctctttcgtctgcccggcaaactgcggatcctgcatttttacactcagcacataggcgcagcgatcccagatatcttccgcgctcagctttacaccgcgcggcagaatattgcggtattcacagaactcacgcatcgcgtccaacaggccctgacgcagaccattaacatgggtaccgccctgcatcgttgggataaggttgacgtagctttcggtcagcagttcaccgccttccggcagccacagtagcgcccagtccacagcttcagtatcaccagcgaaattaccgataaacggtttttccggcagcgtcggcagaccatttaccgcttccgccaggtaatcattcagaccgtcctgatagcaccagcgttgttcggtattgttgatctcatctttaaaagtgatctcaacgccagggcacaataccgctttggctttcagcacatgcgtcaggcgactaacagaaaatcgcgggctgtcaaagaaggtttcatccggccagaagtgcacactggtaccagtattgcgtttaccgcaagtgccgacaacctgtaaatcctgcaccttttcgccattttcaaaggcgatgttataaacctgaccatcgcggcgcacgttaacttctacgcgcttgctcagggcgttaaccacgctaatccccacgccatgcaggccgccagagaactggtaatttttgttagagaatttaccgcctgcatgcagacggcaaagaatcagttcaaccgccggtacaccctcttccgggtgaatatccaccggcatcccgcgcccatcgtcaataacttctaagctctggtcagcatgtaaaataacgtccacgcgttttgcgtgacccgccagtgcttcatccacactgttatcaatgacttcttgccccaaatggttagggcgagtggtatcggtatacatccccggacggcggcgaaccggctcaagcccggtgagtacctcaatggcatcagcgttataagtttgcgtcatggtttaagttagtaattcgagttgatcgtcagagatggtgcagaccaagaaaatcgacgatcgggttgaaataatcttcgaagcccgtgaatgcgtggttgccgccttctatgacagtctggcggcaggaagcgtagtacgccaccgcctggcggtaatccagcacttcatctcccgtctgttgcagcagccagatcaaatccggcgcttccagcgggtcaatctgcatgactttaagatcgtaaatatggcgactctctagcacatattgctgcccggtgtaggggttctcgttctgaccgagatagtccgtcagcagttcaaacgggcgcaccgccgggtttaccaccactgcgggcagcataaaacattgactcaaccaggtggcgtaatatccccccagactgctaccgacaatacccaggctatcaccgccatgttccaggacaatggattccagcagctctgccgcgtcggaaggatacggcggcaactgcggaatgatcatctcaacgtcagggtgatgttccgccagccagttttttaacaagctcgcttttgcagagcgcgggctgctgttgaaaccgtgtaaataaagaagcgtagacatcagtagccttcactagcggtatcaggttggaaacgtgtgtccgccaggcgatgcacctcggtggtcagcgtgccatcagcatgtaactcgagagtacgccagccgggcgcgatggtatccagcgtaaagttggaacagtgcggcttaaactgcacacaggtgctcggcgttgccagcaggcggcgaccattccagtcgagatccagctcctgatgaatatgaccgcacagcaagtatttgacgtgcggaaacttcgccagcacggtatccagttcgcccgcgttacgcagactgtgttgatcgagccaactacaacccgcaggtagcggatgatgatgcagcagcagcaacgtatggcgttctggcgcatcggccagtttacgttccagccactcaagctgaaactcgctcagctcaccgtgcggcacgccaaacacctggctatccagcaacaggatttgccattgctcaccaataaacacgcgcttcgccggggagatacccgcatcctgtaacgcgctgtacatcgcgggctggaaatcgtggttgcccggcagccagacgcagggcgcacgaaaacttgcgatgccttcagcgaaatgctgataggccgcagaggattgatcctgcgctaaatcacctgtcgcgacaatcaggtcgaattcgtgctggtgtggccgaatcgcctccagcaccgcctggtaactctcccaggtgtttacccctaacagggcttcgtgcttttgtgcaaacaggtgagtgtcggtaatttgtaaaatcctgactctggcctcaccagccagaggaagggttaacaggctttccaaatggtgtccttaggtttcacgacgttaataaaccggaatcgccatcgctccatgtgctaaacagtatcgcaaccagtccgctaaaaactgattaatttgatgcttttcgtcgcgttgatgcaactttttattaggataatcataccgcgctttgaagcgaaaaatctgctggctactacacacttcagccaccatcgcgtcatgatacagacgcaccgtcatactcggaaggctccagtaactgatcgcgggcgcagtctgttctattgtcaccagggtagtgtatcgggtgctttccacaatcgtcagccgatattgtgcgtttgccacctgatagcttacagtttcgccgggtgcgtcattgcgcggtaacaaacggcgcaattgactaaagttcatctcgcacaggcgcatcatttcaggaaagtcaggtgtgtaacgcttcatttatgcccactcattttttaacgcttgatgatgcagctgcagccattgcaaagcgatgacgctcgctgcgttgtcgattttcccctcttctacccactggtatgcctgttcccggcttaccacatgaacgcgaatatcttcgttttcatcagccagaccgtgaataccgcttgcggtcgtggcgtccacttcgcccaccataatactgctacgctcactggtgccccccgggcttgccaggaaacttaacaccggtttggtccgtttgactatcagtcccgcctcttcaatcgcttcgcgacgggcaacatcttccacactttcaccctcttcaatcatcccggcaaccatctccagtagccaaggggtttcgctggtgtcgtacgcggcaatccgaatctgctcaatcagcacaacttcatcacgcactgggtcaaagggtagcaagactgcggcgtgaccgcgctcaaaaatttcccgccgcacctcatgactcatttgcccgttgaatagacgatgacgaaatctataaagatctaaactaaaaaagccgcgataaagtgtttctcgtgcaataatttctacatcgtttttgccaaatgtaacgggcaggttgtctggcttaagcattgttaatgtcctggcactaatagtgaattaaatgtgaatttcagcgacgtttgactgccgtttgagcagtcatgtgttaaattgaggcacattaacgccctatggcacgtaacgccaaccttttgcggtagcggcttctgctagaatccgcaataattttacagtttgatcgcgctaaatactgcttcaccacaaggaatgcaaatgaagaaattgctccccattcttatcggcctgagcctttctgggttcagtagcttgagccaggccgagaacctgatgcaagtttatcagcaagcacgccttagtaacccggaattgcgtaagtctgccgccgatcgtgatgctgcctttgaaaaaattaatgaagcgcgcagtccattactgccacagctaggtttaggtgcagattacacctatagcaacggctaccgcgacgcgaacggcatcaactctaacgcgaccagtgcgtccttgcagttaactcaatccatttttgatatgagcaaatggcgtgcgttaacgctgcaggaaaaagcagcagggattcaggacgtcacgtatcagaccgatcagcaaaccttgatcctcaacaccgcgaccgcttatttcaacgtgttgaatgctattgacgttctttcctatacacaggcacaaaaagaagcgatctaccgtcaattagatcaaaccacccaacgttttaacgtgggcctggtagcgatcaccgacgtgcagaacgcccgcgcacagtacgataccgtgctggcgaacgaagtgaccgcacgtaataaccttgataacgcggtagagcagctgcgccagatcaccggtaactactatccggaactggctgcgctgaatgtcgaaaactttaaaaccgacaaaccacagccggttaacgcgctgctgaaagaagccgaaaaacgcaacctgagcctgttacaggcacgcttgagccaggacctggcgcgcgagcaaattcgccaggcgcaggatggtcacttaccgactctggatttaacggcttctaccgggatttctgacacctcttatagcggtagcaaaacccgtggtgccgctggtacccagtatgacgatagcaatatgggccagaacaaagttggcctgagcttcagcctgccgatttatcagggcggaatggttaacagccaggtgaaacaggcacagtacaactttgtcggtgccagcgagcaactggaaagtgcccatcgtagcgtcgtgcagaccgtgcgttcctccttcaacaacattaatgcatctatcagtagcattaacgcctacaaacaagccgtagtttccgctcaaagcagtttagacgcgatggaagcgggctacagcgtcggtacgcgtaccattgttgatgtgttggatgcgaccaccacgttgtacaacgccaagcaagagctggcgaatgcgcgttataactacctgattaatcagctgaatattaagagtgctctgggtacgttgaacgagcaggatctgctggcactgaacaatgcgctgagcaaaccggtttccactaatccggaaaacgttgcaccgcaaacgccggaacagaatgctattgctgatggttatgcgcctgatagcccggcaccagtcgttcagcaaacatccgcacgcactaccaccagtaacggtcataaccctttccgtaactgatgacgacgacggggcttcggccccgtctgaacgtaaggcaacgtaaagatacgggttatctgccgcattcttcccccttcagccttcaatttcgaccagccatcctctattctgatgggtatttaccactggtcccggaagacaaaaatgaaacggacaaaatccatacgccacgcatcgttccgcaaaaactggagcgcacgccatctgacaccagtcgctctcgcggttgccactgtttttatgctggctggctgtgaaaagagtgatgaaacagtgtctctctatcaaaatgctgacgactgtagtgctgcaaacccaggcaaaagcgccgaatgtaccaccgcgtacaacaatgcgctgaaagaagccgaacgtactgcgccgaaatacgccacccgtgaagactgtgttgctgaatttggtgaaggtcagtgccagcaggcaccagcccaggctggcatggcaccagaaaaccaggcgcaggcccagcaatccagcgggagtttctggatgccgctgatggccggttacatgatggggcgtctgatgggcggcggcgcgggatttgcacagcagccgctgttctccagcaaaaacccagccagtccggcttacggtaaatataccgacgcgacgggtaaaaactatggcgcagcccagccaggccgcaccatgaccgtaccgaagacggcaatggcaccaaaaccggcgaccaccactaccgttacccgtggcggttttggtgaatctgttgccaaacaaagcactatgcagcgtagtgcaaccggtacctcttctcgtagtatgggtggctgataccgatggaaagagtcagtattaccgagcgcccggactggcgtgagaaagcccacgaatacggtttcaattttcacaccatgtacggcgagccgtactggtgtgaagatgcttactacaagttgaccctcgcccaggttgaaaagctggaagaagtcaccgccgaactgcaccagatgtgcctgaaagtggtggaaaaagtgatcgccagcgatgagctgatgaccaaattccgcattccaaaacacacctggagttttgtgcgccagagttggctgacgcaccagccaagcctttatagccgtcttgatctggcgtgggatggcactggtgaacctaaacttctggaaaataacgccgatacgccaacgagtctatacgaggcggcgttctttcagtggatctggctggaagatcagcttaacgccggtaacttgccggagggcagcgaccagtttaacagtctgcaagaaaaactgatcgatcgcttcgttgagctgcgtgaacagtatggcttccagttgctgcatctcacctgctgtcgcgacacggtggaagatcgcggaaccattcagtatttgcaggactgcgcaacggaagctgaaattgctactgagttcctctacatcgatgatatcgggttaggtgaaaaaggtcagttcacggatttacaggatcaggtaatttccaacctgttcaaactgtatccgtgggaatttatgttgcgtgagatgttcagtaccaagctggaggatgcaggcgtacgctggctggaaccggcgtggaagagcattatctccaacaaggcacttctaccgctactgtgggagatgttcccgaatcacccgaacctgctgcccgcttattttgcggaagatgatcatccgcaaatggaaaaatatgtggttaaaccgatcttctcccgtgaaggcgcaaacgtgagcatcattgagaacggcaaaaccattgaagcagcggaaggtccgtatggcgaagaagggatgattgttcagcaattccacccgttaccgaaattcggcgacagctatatgctgattggtagctggctggtgaacgatcaacccgccggaattggcattcgtgaagaccgtgcattgatcacccaggatatgtctcggttttatccacatatttttgttgaataagccacgataccggatggcactcgccatccggtaattgttagcctatctgcacgctcagcatactcaggctgcccatttctataccctcaaccggaatggtaattggctcctgcccatcccacgcacctaacacatacaacaacggcaaataatgctctggcgttgggttgcttaacgtgccaccttcatggtcgaggtaattcaccagaggatgttgttccactggcccttgccacgtcagattcgctttcacatactcattaaagctcgtcgcccacggatacggactactatcaccgtgccacttcactgtgcgcaggttatgcaccacgttaccgctggcgaccaacattattccttcatctcgcagcgctgccagtttgcgccccatttcgaaatgccaggcggcaggtttgctactgtcgatactcaactgcaccatcgggatatcagcgtcaggatacatcttaatcagcacgccccagctgccgtggtcaaagccccaggcttctttatccagcgtcaccgggatcggcgctaacagctcaaccagacgctgtgccagcgcagggctacccggagcaggataatgcgtatcgtacagcgcctgcgggaagccaccaaagtcatgaatcgtgggcggcgtctccatcgcggtcactcctgttccacgggtaaaccagtgagcgctaaccaccacaatcgcttgcgggcgtggcaatgtcatccccaacttctgccagctgcgggtatacaaattatcttccagcacgttcatcggactaccgtgacctaaaaacaatgctggcatacgtgtactagacatgatgatatccttaactaaaggtgtcattttgatatcctcacaatacgcttgttcggcggagtaagaacccggataacaatgatgatgatcatcagttattttgacgatctgcctgaaggtgaagatttataaggagttgtcgatgagtgtacctctcattctgaccatactggcgggggcagccacgtttattggcgcgtttctcggcgttctcgggcaaaaacccagcaaccgcttactggcgtttagcctaggttttgcggcggggatcatgttgctcatcagtttaatggaaatgcttcctgccgcactagcagctgaaggaatgagccctgtgttgggttatggaatgtttatcttcggtctgcttggctattttggcctggaccgcatgttgccacatgctcatccgcaggatttaatgcaaaaaagcgtgcagccgttgccaaaaagcatcaagcgcacagccattctgctcactctcggcatcagtctgcataacttcccggaagggattgccacctttgtcacggcgagcagcaacctggagctgggatttggcatcgcactggccgtcgcgttgcacaatatccctgaaggtctggcagtggcaggcccggtttatgcggcaacggggtctaaacgcaccgcgattctgtgggcggggatttctggactagcagaaattcttggtggtgtgctggcgtggttaatcctcggtagcatgatttccccggtggtcatggcggcaatcatggcggcggttgcaggaattatggtggcgctcagcgttgatgaattaatgccgctcgccaaagagattgaccctaataataaccccagctatggcgtactatgtggaatgagtgtgatgggattcagtttagtgctgctacaaacggcgggaattggttaaaaacaacatcagaagttgtccagcgcatggacaacttctgccagcttcacgaaagccttattctaccttttcggctgtctcttctctcgtactgtttaagtatttgttccgcgcttcaagcagtgcgtctctgtcctggcgaaacgcccgacaataacgtttcaaatgcaggaaataacccaccacaaccagagcaatcaatacaatccagtaccaggcgataaacatccttttacccttaatatttaacaatactaaacatttagcgtataaatttcacatatcctttttcggatatattcatatggtcgcataataacggaacaattatatgattttgatcataatgaaaaagaatgcctgatattaatgaaattttctcatagaaagagaagcggaattaacatcttgcatagcagggaaaaataaaaaccgaagcctgctacaacttcggtttcttgattaaggcagtaaattaagcagcggttttcagctggctttacgctcatgtgcctgacggtatgccaccaggtcttcaatagtcacgagcgccatattgtgtttattggcaaactcaatacactctggtgcacgcgccatcgtgccatcgtcattagtcagctcacacagtacaccagccggtttaaagcctgccagcgtcatcagatcaatagttgcttcagtatgaccgccacgcgtcagtacaccacctgcctgagcgcgaagtgggaaaacgtggccaggacgattcagatcactcggttttgcgccatcggcaatcgctgcgcgaacggtcgtaatacggtcagcggcagaaacaccggtagtcacaccttcagctgcttcaatggtcacggtaaaaccggtgccataggcgctggtgttattttctaccatcattggcagatcgagttgtttacggcgatcttcagtaatgcacaggcaaacaataccgctaccgtggcgaatggtcagcgccatctgctcaacagtcatggtttctgccgggaagatcatatcaccttcgttttcacggtcttcatcatcaagcaccattacaccgcgtccttcacgcagcgcagccagtgcattttcaacacgttcgaaaggcgtaccaaaagaggaaagtagcgtctgattcatggtaaaaaaacctcactaaaattatggttaccagaatcagggcagtcttaggagtggcggcatatagccaaaataacgtgagcgggtccatgcccgacagaatcgttactctctcccatccggactctaaccgtcggccccggaattacaccggatctgctgtcctttgagttcgcacccaaagcgctcgcgggctttcaactgagttgatttaccgccggtggggaatttcgccccgccctgagaataagcggattcactataacgctaatgattagcggcagcaacgcatagcttcacataattctggtttatatctaatacaaacactaaaacgggccatcaggcccgttatatcagtgctctaactccagctctcttgcctgcatcatctgttgacaataccaggcataacgtgcgcaaaaccaggttctatgttcttcatccatgttaccagtaacggccagaatatcgaccgggcgaccttctgcgtgcattctggcaaaactacgcgccaggaaatcgaaattatttaaagaattaagactatgatccataagcacatcctccggttatcgcataccttttaaggccatatgctttttctgatttcagtattccccaatcagtgtagtgcctttaaacataacgtgcgtaaatatattgtccccgatcacactttttagtgaaaaataaaaaaccatattaaaagactttctcttccagaacttctctaacctgtgttattattaacacagataaatgtaagcaaggaaactattacaaagtaaatattgcgtcactaaatggacattggagtgatatatgattttattcgccgactataacaccccttatcttttcgctatttcctttgtactgttgatcggcctgttagaaatttttgcgcttatctgcggtcacatgctctccggtgctcttgatgcacatcttgaccattatgattctataaccacaggtcatattagccaggcacttcattatctcaatattggaagattgccagctctcgtcgttctctgcttactggctggtttttttggtcttattggcatcctgttgcagcatgcctgcatcatggtctggcaaagtccactgagcaacctgttcgtggttcctgtcagtttactgtttacgattattgcggtgcattataccggtaaaatagttgcgccctggattccacgcgaccatagtagtgctattacagaagaagaatatattggtagcatggcgttaattaccggtcatcaagccactagtggtaatccctgcgaaggaaaactcaccgatcaatttggccaaatacattatttactactggagcctgaagaaggaaaaattttcactaaaggagacaaagtgttaattatttgccgactttctgcaacgcgatatttggcggaaaataatccctggccccaaatattgtaatttattaatcaaaaggaaatttaataatggatgatattgttaattctgtgccctcctggatgtttaccgcaattattgccgtatgcattctgtttattattggaattattttcgccaggctctatcgtcgcgctagcgcagagcaagcttttgttcgtactggtttaggtgggcaaaaagtggtaatgagcggtggcgcaatcgtgatgccgatctttcatgaaataatccccatcaatatgaatactctgaagctggaagtcagccgcagtaccattgatagcctgattacgaaagatcgtatgcgcgtcgatgtagtagtcgctttctttgtgcgggtaaaacctagtgtagaagggattgccaccgctgcccagacgctggggcaacgcaccctgagccctgaagacttacgtatgttggttgaagataaatttgtcgatgccctccgtgcaacagctgcgcaaatgaccatgcatgagttacaggatacccgcgagaactttgtgcagggggtgcaaaatacagtggcagaagacctgagcaaaaacggtctggaactggagagcgttagtcttaccaactttaaccagaccagcaaagaacatttcaatccgaacaatgcctttgacgccgaaggtttaaccaaactgactcaggaaacagagcgccgtcgccgcgaacgtaacgaagttgaacaggatgtagaagttgcggtgcgtgaaaaaaatcgcgatgcgctaagccgcaagctggagattgaacagcaagaagcgtttatgacgcttgagcaggagcagcaggttaaaacccgtactgccgaacagaatgcacgtattgcggcttttgaagctgaacgtcgtcgtgaagcagagcagacacgaattctggctgaacgacagattcaggaaacagaaatcgaccgcgaacaggccgtccgcagtagaaaggttgaagctgaacgtgaagttcgcattaaagagatcgaacagcagcaggtcaccgaaatcgctaaccagacgaaaagcatcgctattgccgccaaaagcgaacaacagtcccaggcagaagcgcgtgctaatctcgcacttgcagaagcggtaagcgcccaacaaaacgtagaaaccactcgccagactgccgaagccgatcgtgctaaacaagttgccctaatcgctgccgcgcaggatgcagaaaccaaagcggttgaactgaccgtgcgggcgaaagcagaaaaagaagccgcagagatgcaggcggcggctatcgttgagttagccgaagctacacgtaaaaagggtctggcggaagcagaagcacaacgtgcgctgaacgatgctatcaacgtactttctgatgaacaaaccagccttaaattcaaactggccttgttgcaggcgctgcctgcggtaatagagaaatccgttgagccgatgaagagtatcgacggtatcaagattattcaggtcgatggtctgaatcgtggcggcgctgcgggtgatgcaaacacgggtaatgtggggggcggaaacctggcggaacaagcattaagtgccgctctctcttaccgcacacaggcaccgctgattgactccttgctcaatgaaattggcgttagtggcggcagtctggcggcattgactagtcccttaaccagtacaactcccgtcgaagaaaaagcagagtaaaccctcttccaggaataatccctggcccaaaaagccggggattttttatatctgcgttccgctaaaaagtgcaaatgatcaggttgttgcagcattttgcgtgacggctcggggaaggcaaaactgcatcagagaaagcattgcgtggggtctggcgctcatcaacaatcggggagtcagcagggggctgaaacgggaaagcccctcccgaagaagggggccttacagaaggaaagggttatgatgaagctcgtcatcatactgattgtgttgttactcgtaagtttcgcagcttattaacagccaatcagaggggggagaaatcctccctcacccttgttcctttactttaggttgaaaaaaaatcagcgtcaagaaggtttcattaacacatatccctggcccaaaaagccggggattttttatatctgcgttccgctaaaaggtgcaaatgctcaggacgttgcagcgttttgcgtgaccgctcggggaaggcaaaattgcctctgggaaagcattgcgcggggtccggcgctcatcaacaatcggggggcagcaaggggctgaaacgggaaagcccctcccgaagaaggggccttgtataaggaaagggttatgatgaagctcgtcatcatactggttgtgttgttactgttaagtttcccgacttactaacaactcatcagaggggggagaaatcctcccttacccttgttcctttactctaggttgaaaaaacaacagcgtcaataggcctgccatgtacgaagcgagatctgtgaaccgctttccggttagccttttttatcctgttggatcttcttgatgatgttggtcgtgctgcaaccgtcttcaaagttgagcaccaacacttcgccaccgttggcccagacttctttactcccggcaatctcttctggtttatagtcgccgcctttcaccagcagatctggcaagatcccggcgatcaagcgctgcggcgtgtcctcttcaaagctcactacccagtcgaccgcttccagtgcgcccagcacaatcatacgctgttcgagtgggtttaccgggcgggaatcccctttcagccgtttggtggaggcatcgctgttgacggcaacaatcaagcggtcacccagcttgcgggcatttgccagataagagacgtgcccggcgtgcaggatgtcaaagacaccgttggtcatcaccactttttcaccacgtttacgcgctgccgctacggccagcttcagttcctcttcggtcatcacgccaaagcctgtatctgcacgtccacgtacagcattttccagctcgatcgggctaaccgtggaggttcccagtttgccgaccaccacgccagccgccgcattggcaaagaagcaggcttcttccaggctattacccgctgccagcgttgccgccaggacgccaatcaccgtgtcgcccgcaccggtaacgtcatacacttcctgcgcttgggttggcatatgcagcggcgctttacccggttgcagcaggctcataccctgttcggaacgggtcactaacagagcgctgagttcgtaatcggcaatcagtttcatgccgcgctcaacaatctcttcttcggtcttacatttaccgacaacagcttcaaattcgctgagattcggcgttaacagcgtagcgccgcggtagcgctcaaaatcggtaccttttggatcaatcagcaccggaacacccgctttacgcgccagttggatcatctgctgtacgcttgccagcgcacctttggcgtagtcagaaagcaccagcgcgccaatgctactcagcgcctgattaatccgctcgtgcagcggctgcggatcaacaccttcgaaaccttcttcaaaatccagacggatcagctgttggttgcgggaaagtacccgtaatttggtaatggtcggatgcgtcggtacagaaacgaagtcgcatttgacgttgacgtcggccagagatttactcagcgcgcgcgctgcatcgtcaatgcccgtcaacccgaccaggcgtgcattagcaccgagagaagcgatattcatcgccacgttagccgcgccgcccggacgttcttcgatggtattcactttaaccacgggcaccggcgcttccgggctgatacgactggtggggccgtaccagtaacgatccagcatcacatcaccaaccaccatcactcctgcacgttcaaactctggcagcgttactttcattcctgtctcctgagagattcaaaatttgcgcgcgataataccatacttcattcttccaccagccacttctgccagcttgcccgcaccagttcacgctctgcggtgaagcaatcctcgctcacatggcccggcaattcctgtaatgccagatgatgaagttcatcgcgaagcgtagtgtaagcacgggtcagcgccatcgcttcctgctcttccataatgtcgttttgcgccagtagttccagaatacgcacgttgtcactccagcgcgttaacttcggtttttcatgagcgtagcgcaacaccagatattgggtaataaattcgatatcggtaattcccccttcatcagctttgatatcaaagcgatcgcgatgtttattgccgagatgagcgcgcattttctcgcgcatttcccgcacttccgtttgcagagttttaccttcacgcggcagcgtcataatctcgcgacgcactgcgtcaaagtgcgcggtgagctgcggatcgccgtacactacacgcgcacgcaccagcgcctgatgttcccacgtccaggcctcgtttttctgataatcggcaaatgcttctgcggatgtcaccagcattcccgccgccccggacggacgcagtcgagcatccacttcatacaaaatgccggaagaggtacgcgtactgaacagatgcataatgcgttgcgccagacgcagataaaactgccgcccgtcgatttcccgctcaccgtcagtcatcgcatccattgggcaatcatggaggaagataaggtcaagatcggaactgtagcctaactcccagccgcccagcttgccgtagccgaccaccgcaaaaccacgcccttcgcgttcgttcaggtgattcggcttaccgtagcgggcaaccatttgaacccacgcctgctgaacgacggcatctatcatggcttccgccagccaggttaagtgatcgctcactttcatcaccggtagcgtaccggcgatatccgctgcggcgatgcgtaacagctgcgcctgtttgaactgacgcagcgcctcaagctgttgctcttcgtcatcttccggcacgcgcagcaaatactggcgcaactcatcgcggtaggcatcggtcgccgtcggctggtaaagggtgtttggatcgagcaattcatccagcaataatggataacgcgccagctggctggcaatcatcgggctcgcggcacacagagaaatcaaatgtttaagcgccgcggggaattcactgagcaattctaaataggtggtgcgggtaacaatccccaccagcaaggcggtaatgcggctcagcgtaacggcagcgtcttcacgcgcacagacatcacttagcagatgcggcatcagatggtcgagcacctgacgtcctcgcggcccgatggtgcgcttatccagctctttgcggaaatcggcaatcagcgttagcacctgtttgcgatcatcctcgctaagatgcgccagcactggcgtagtgtcatcttcctgcaacgcatcctgccacagctcacgccactgttcgctcaggctctcttcctgagtttcactttcatcgtcgccaatcaattcattaaacacccggcgcacattggtcatatgtgcggtcagcgccccggtcagttgcggccagtcagcaaagtccatcgcccacgccagccgcgcacgattaagctcatcagaaggaagcgtctgggtttgttcgtcgttaatgctttgcagcaggttttccagacgccgcaggaacagatacgccactcgcaattgttcagcatcgttttcagaaagcagatgcagctcggcaatggcgctgagcgttggcagtaaagagcggctttgcaggctcggttcgcgtccgccgcgaatgagctggaacacctgaacgataaattcaatttcgcgaatgccgcctgcgccgagtttgatattgtcggtcaaaccacgtcgacgcacttcacgggcaatcatccctttcatgttgcgcaggctctgaatcacgctgaaatcgatgtaacgacggaaaacaaacgggcgcagcatcgcacgcaactcgttagcatagacgccttcgctatcgcccataatccgcgccttgaccatcgcgtaacgctcccagtcgcgcccctgctcctggtaataatcttccaacgcggcaaagctcagcaccagcgggccactttcgccaaacggacgcagccgcatatccacgcgatagacgaagccatcctgcgttggttgatccagcactttaatcagccgctgccccatgcgggtaaaaaactgcgcgttatccagttcccggcgtccaccctgcgtacaaccatgttccggccaggcaaaaatcagatcgatatcagaggagaaattcagctccccaccgcccagcttacccatgcctaaaatcagcagcggttgcgcttcgccctgcgcattgcacggcgttccccactcgcggcagcaggcgtcatacagccagtcacgcgccgcaacaatcagcgtctccgccagatagctgagctgctgcaatatgctctcttcagtaaccagtgccagcgtttgcgcccaggcgatgcgcaccataatgcgccgccggaatagccgcagctcgcgcattaacccggcttcgtcactcacattacagagcgcctcctgcaaccatgccgcgtaatgctgccattcgtcggcctgcggcggttggctttccagttccgtcagccactctggatgcgcaatcacgctgtcctgcacaaaatcactaaaagtaagtacactcttcgcctgtgcgctaagactttcctcggctaaaggctctggcagccgctcaacaacggtctgccagtactgctgtaacggactagagagcggcttcataagcgattttatccttgcctgattaacgttttccgctgtgcaaccagaacggttcctgattgtttgcctcattacggaaatgttcaatttcgatgcgttgcccggtcgcaatagcgtgatgcagcccctgccagttctccagccaggcttgcgcgacgacaggatcatagtaacccgccagcaacagtatactgtcaatatcacgcgtcaggcgtggcaactggtcacggtagcgatcgcctaacggctggcagaaaacgcttttcagttcagcggcatggcgggaaagatggatatcggcaaagcgtttgaaggagtcgctgattttgccctgcgctttggcatctaaaaatggctgccatgctttgcttaccaaccattcggtcaacgccagcttcgccattgccgtttcggtagagtagaccgccgtcacggcagacaccgcagaagcaatggtcgcctcgcattgagtcagcagatcacgtaagtgagtgctcgctttacgcggcacaataccaccgaacagcatcagcgtatgacggaccaggctaatggctgccagcacctgttctttcgccgcatcgttgccgcgtacccacagttcttcatgatactgccattgcgctaacgccagctcgagcgccgcttccagcccctgttccacatcggcttttgccgcaacatgcaaaatggtggtcggtttgatttcacgcgccggattgccctgcgccagatgatagccacgcgccgctttgctcaggctgccctggcgtaatccggtttggcttaccagttggttcgccagtttcagcaccgcgcgcgtgtcgccgctaagcagttccagttccagctcacagataggttcagcaaattcacccgctttcacttccccctggtcgagggcgatttcaatttggctaccatcgaccgccaccagccatttttcgcgataaaaatcggtgctgaacagcggctgcacgcgggaggcgagatcggcgggcaattcgccgttcggccagacttccgtcggtaactgcgccaggtcgagcgtcggttcgctcaacgccacgttatattccgggcgctgatgtaagccgcctgtcactcttcctgcaactttcatggtcatctcatagcgaccgttttcgccacgaatacgtaagcccatatcgtgcccacgcagccagttatccggcgtttcgtagtaaatattcagcaactgcacggggtcatggtgctcgccgcccagcgtattgagatggtcacgcaacgcctcaacggcactgtgattaacaataaactttaattcgatttcctgagccatggcctttacttatcggttatgtcacataagtgacgatgaacggcgaacttaatgcgatcttttttgtcagtagatagtattttgcgccaaattgccatgcaacgggcaatttgacgggcgtaaaagtttgaagcagtggcaagacctgacacagaggattccgattgatgtcgaatgctttgcgtagcgacactgatgccactactatcgttccactttccatgacaataacgacagcctgatgccaaaattacgcctgatcggattaactttactcgcacttagcgcgactgccgtcagtcacgctgaagaaacgcgctatgtttccgacgaactgaatacctgggtccgcagcggtccgggagatcattatcgcctcgtgggcacggttaacgccggcgaggaagtgaccttattacaaactgacgccaacaccaattatgcccaggtgaaagacagctctggccgtaccgcctggatcccgttgaaacaacttagcactgagccaagcctgcgctcccgtgtgccagatctggaaaatcaggtcaaaaccctgaccgataaactcaccaatatcgataacacctggaatcagcgcaccgcagaaatgcagcaaaaagtggcgcagagcgacagcgtgatcaacgggttaaaagaagaaaatcagaaactgaaaaacgagctgattgtcgcgcagaaaaaggtcgatgccgccagcgtacagctggatgacaaacagcgcaccatcatcatgcaatggtttatgtatggcggtggcgtgctggggcttggcttgctgctcggtctggtactgccgcacctgatcccaagccgcaaacgcaaagatcgctggatgaactaaatcgccttcttcgttgcactgtcttattattaggaattgtgtatttgacgaagggatgatggcgtgaagatttatctggtcggtggtgctgttcgggatgcattgttagggctaccggtcaaagacagagattgggtggtggtcggcagtacgccacaggagatgctcgacgcgggctaccagcaggtaggccgcgattttcctgtgtttctgcatccgcaaacgcatgaagagtatgcgctggcacgtaccgaacggaaatccggttccggttacaccggttttacttgctatgccgcaccggatgtcacgctggaagatgatcttaagcgtcgcgatctgaccattaatgcgctggcccaggacgataacggcgagattatcgacccgtacaacggtctgggcgatctgcaaaatcgtctgttgcgccatgtttcccccgcttttggcgaagatccgttacgcgtattgcgcgtggcgcgttttgctgcgcgttatgcccacctcggttttcgtattgccgatgaaactctggcgttgatgcgcgagatgacccatgcgggtgaactggaacacctgacgcctgaacgggtatggaaagagacggaaagcgccctcaccacccgcaatccacaggtgttcttccaggtactgcgcgattgcggcgcactgcgcgttttattcccggaaattgacgcactgtttggcgttccggcccctgccaagtggcatccggaaatcgatacgggtattcataccttaatgacgctcagtatggcggcgatgctgagtccgcaggtcgatgtccgtttcgcaactttatgccacgatctcggtaaagggctgacgccgccagaactctggccgcgtcatcatggtcatggcccggcgggtgttaagttagtggaacaactatgccagcgtctgcgcgtgccaaatgaaattcgcgatttagccagactggtggctgagtttcacgatctcatccacaccttcccaatgctgaacccaaaaaccatcgtcaaattatttgattccatcgatgcctggcgtaaaccgcagcgtgtcgagcaactggcgctgaccagcgaggctgacgtgcgcggcagaaccggttttgaaagtgcggactacccgcaaggccgctggttgcgcgaagcctgggaagtggcgcagagtgtgccgacaaaagccgtcgttgaagcgggatttaaaggtgtggagattcgcgaggagctgacccgacggcggattgcggcggtagccagctggaaggaacaacgttgcccaaagcctgaatgagtattgggcattttgccggatgcggcgtaaacgccttatccggctacatgtcaacgacagttgtaggcctgataagacgcgcaagcgtcgcatcaggcgttgattgccggatgcggcgtgaacgccttattcggcctacgcaatcgttgacaacgccaagcatccgacactattcctcaattaaaagaacacgacatacaccgcagccgccacaataaagcgataaatggcgaacgggataaagctaatgcgcttaatcaattgcaggaaggttttaatcgctatcagcgccaccacaaaagcggtgataaacccaacggcaaacatcgggatatcgccgcttgtcaggaagccccagcttttgtagagatcgagcgccgttgcgcccatcatcatcggcaccgccagcaggaagctaaactcggaagcagcgtaacggctcacccccatcagcatcccaccactaatggtcgccccggaacgggagaaacccggccacagcgccagacactggaaacagccaatcataaatgcctgacgataggtcatatcatcaagacccggcgcacgcggctctttcggcttcaggcattcggcggcaatcagcaacaaaccgccaacgaccagcgcatacatcacatttatcgggttaaacaaactcttaatcgtgtcgtggaacaacagccccaataccaccgccggaatcatccccagcaaaatgtggatcagcgttaaacgacctttgctttcaccttcgtgctgcaacgggcggccaaagtggatgccaatcaggccaaacagacgccgccagaacatcactactaccgccagaatacttcctaactggatcacaacttcaaaggttttcgccgtgtcgccctcaaaccccaacaagtgaccgacaataatcatatggcccgtgctggataccggcagaaattctgtcaatccttcgaccacacccaatattgccgctatcagcaggctgtgcatatcgctcatcaataaacccctaaattattaaaatgtaccgcttgtccgaactactgcgtatgaccaggttataaccgtttggtttaacagctgtaaaattaattattttctttcagattattgccacgctcaatgattacgccaacattcgccgcccgcgccactgcgcctggcttgctgagtttgatacgcacccacgggctgttgaagcgtgctaacagcagctccgccacctcttcagccacgcgttccaccagcgcaaaacgcgccccctcgacgtggctgaccaccgtttctgcaatgtcagcgtaactgaggcaatccgccacatcatcacttttcgccgctttacggttatcccacgccatttcgatatcgaacactaacttctgttcgatggtctgttcccagtcgtaaacaccaatagtggtgattacgctaagttgctctataaatacaatatccatcacgtcctgcctgctttttggctaaccggataccacttccggcgaaatgtgcgtattatccacagattcatcgttgaacacgaattttcaaaacggaacagcttatgagtgcaatcgcgcctggaatgatcctcatcgcgtacctctgcggctccatttccagtgccattctggtttgccgcttgtgtgggctgcccgatccgcgaaccagcggctccggcaatccaggcgcaaccaatgtgttacgtatcggtggcaagggagcagccgtagcagtactgattttcgacgttctgaaaggaatgttgcccgtctggggcgcgtatgaattaggtgtcagccccttctggctaggcttaattgccatcgccgcctgtcttggacacatctggcccgttttcttcggatttaaaggaggaaaaggcgttgctaccgcttttggtgccatcgcacccattggctgggatctcaccggagtaatggcgggaacctggttactgaccgtgctattgagcggatacagcagcctgggagcgattgtcagtgcactgattgctccgttttatgtctggtggtttaagccacaattcaccttcccggttagcatgctctcttgcctgatcctgctgcgtcatcatgacaacatccaacgtctgtggcgtcgtcaggagacaaaaatctggacgaaattcaaaagaaagcgcgaaaaggatcccgagtgatttctggtggatttacatgacctgatagccttcatcgggcttgcccagccgttgctggcaccatgccgccagaaattccacgcagacacgtaatttcatgctgcgatagagcggctcccggtaaacagcccagatattggcgctttgtgcatactctggcaatacttgcaccagtttgccactctccagaaacggcaacacatcccactcggaacgcagcataatccctttaccctccagcgcccattgcagcacaatctcgccgctattggaggaaagatgcccgcttaccttcacgctttttttctcctgaccgttccccaactcccatattccatgggtcatatcgcgctctttggtcaccagacagtcatgacgacttaattcctgtagggattgtggctgcggatatttttgcagatactcaggtgctgcgcataatattcttttattttttgtcaaaagatgcgcaatataataatcaggaatttcgtcattaatacgaatatccagatcaatattatcctgcactaaatcaatttgccgatcgaacaattcaaaatgcacctgtaactcaggataattgcgcatcagttcggtaatagctggcgcaatatggctgcgcccaaaaccaaaactgcaaccaatacgaatcatcccctccgggcgcgttttgatttgcgtgacgtcatcgaccagtcgctgatattgggtgaggatttccaacgcatgttcgtaacaacgttggccactttcagtcagcgccacgccgcgagcggagcggttcagcagcgttgttgccagcgtattttcaaggatttggatccgcttggtgacaaatgcaggcgtctgcccaagcgtcgccgctgcggcgctaaaactcccgctgtgaacgatttctaccagtacctgcaagtctttggctaaaggccagctattcagcatcgttaattatccgcagttgtgataagcgcagtgtatttcgcaaaacattgccattccctgctctggcgcaatattcattcttattttcgcgttgattcacgaactgttaattacatattcacggtggcaaaaaatataaaaccacatttttagtggtagtttgtggcggtgaatttttccagacaaatacaaaaactggagttgccatgatgagcgaaagtaataagcaacaggcagtgaataagttgacagagattgtcgctaactttaccgccatgatttctacccgaatgcctgatgacgtggtggataaactaaaacagctaaaggatgccgaaacgagcagcatggggaaaattatctaccatacgatgttcgacaacatgcaaaaagcgattgacctgaatcgtcctgcctgtcaggacaccggggagattatgttcttcgttaaagtcggttcccgcttcccactgcttggcgagctgcaaagcatactcaaacaagccgtggaagaggcaaccgtcaaagcgccactacgtcacaatgcggtagaaatttttgacgaagtaaacaccggcaaaaataccggtagcggcgtaccgtgggtcacctgggacatcatccccgacaatgacgatgcggaaatcgaagtttacatggcaggcggcggctgcacgctacctggccgcagcaaagtgttaatgccgagtgaaggctacgaaggcgtggtgaaattcgtcttcgaaaatatctccaccctcgccgtaaacgcctgtccaccggtactggtgggcgtgggcatcgccaccagcgtggaaaccgccgccgtactcagccgtaaagccattttgcgcccgattggcagccgccatcccaatccaaaagcggcagaactggagctacgcctggaagaaggactcaaccgtctggggattggtccacaagggctgaccggcaacagtagtgtgatgggcgtacatatcgaatctgccgcccgccatccgagtaccatcggcgttgctgtctctaccggctgctgggcgcatcgtcgcggcacgctgctggttcatgccgatctcacctttgaaaatctgtctcacacccggagcgcgttatgaaaaagatcctgacaaccccgatcaaagctgaagatctgcaagatattcgcgtcggcgatgtgatctacctgaccggtacgctggtgacctgccgcgacgtttgtcaccgccgtttgatcgaactgaaacgtccgatcccttacgatctcaacggcaaagcgattttccacgctggccccatcgtgcgcaaaaacggcgacaaatgggagatggtctccgtcggcccgacaaccagtatgcgtatggaaagttttgaacgtgaatttattgagcagaccggcgtgaaactggtggttggcaaaggtggtatggggccgctgaccgaagaaggctgccagaaattcaaggcgctacatgtgattttcccggcaggctgcgcggtgctggcggcaacccaggtggaagagattgaagaagtgcactggacagagctcggaatgccggagagtctgtgggtctgccgggtcaaagagttcggcccgctgattgtctctattgatacccacggcaacaacctgatagccgaaaacaaaaagctgttcgccgaacgccgcgatcccatcgtggaagagatctgcgagcacgtccattacatcaaataaccctcccggagaggctcacccctctcctttttcgcaggcataacacgatgaaaccttccactgaatggtggcgatatcttgcgccgctggcggtcatcgccattattgctctacttccggttcccgcagggctggagaaccatacctggctctactttgccgtttttactggcgtgatcgttggactgatcctcgaacccgtgccgggtgccgtggtggcgatggtgggtatatccatcatcgccatactctctccctggctgctgttcagcccggagcagctcgctcagccaggctttaaattcactgcaaaatccctcagctgggccgtttccggtttttctaatagcgttatctggctgattttcgccgcctttatgtttggcacaggctatgaaaaaaccgggcttggacgccgcattgcgctgattctggtgaaaaagatgggacatcgcacgctgtttctcggctatgcggtgatgttctccgagctgatcctcgcacctgtaacaccgtccaacagcgcgcgtggtgcggggattatctatcccatcatccgtaacctgccaccgctctatcaaagtcaaccaaacgacagcagtagccgcagcattggcagctacatcatgtggatggggattgttgccgactgcgtgaccagcgccattttcttgacggcgatggcaccaaacttgctgttaattggactgatgaaaagcgcatctcacgccacgctgagttggggcgactggttcctcgggatgttgccgctcagcattttactggttctgctggttccctggctggcttacgtgctgtacccgccggtactgaagtctggcgatcaggtgccgcgctgggcagagacggaactgcaggcaatgggcccgctctgtagccgtgaaaaacggatgctggggctgatggtaggcgcgctggtgctgtggattttcggcggtgattatatcgatgccgcgatggtcggttacagcgtggtggcactgatgctgcttctgcgcattatcagttgggacgacattgtcagtaataaagcggcgtggaacgttttcttctggctggccagccttatcaccctcgccaccggactcaacaacaccggttttattagctggtttggcaaactgttagcaggcagcttaagcggttatagcccaacgatggtgatggtggcgttgattgtggtgttttatctactgcgctactttttcgccagcgccacggcgtatacctccgctctcgcaccgatgatgattgctgctgcgctggcgatgccggaaatcccgctgccggtgttctgcctgatggttggtgcggcaattggtctggggagcattcttacaccatacgccaccggccccagtccgatttactacggcagtggttatctgccaacggcggattactggcgactgggggcgatttttgggctgatattcctcgtattgctggtgattaccggcttactgtggatgcccgtggtgttgctttaagtgaggacggtgccggaaattgctctccggcacccaatagttttacgcagccggtaactccgccagcggccagcgcggacgcacgctaacgccgagatccgccgtcgcgcctgctttaaaccgcaccattccggcataggcgatcatcgcgccgttatcagtacaaaattccggacgcgcgtagaacacttcgccgcggcgttttttcatcatttcagccagcttcgcccgtaacgtacggttagcactcacgccgcccgccatgaccagtcgcttaaagcccgtctgacccagcgcccgcttgcacttaatcatcagcgtatcgaccaccgcatcttcaaaggcgcgggcgatatcagcacgcgtctggtcgtcggtgccgttgtcacgaatggtatttgccgcgaaggttttcaggccggagaagctgaaatccagccccggacggtcggtcatcggacgcgggaagacaaagcgcccggcagtaccctgagccgccattttgctcagtaacggcccgccaggataatccagccccagcagcttcgcggttttatcaaacgcttccccggcggcatcatcgatagactcgccgagcagctcgtactgaccaatgccagtcacgctgattaactgcgtatgaccgccggaaacaagcagcgcaacaaacggaaattccggcgggttatcttccagcatcggcgctaacagatgcccttccatatggtgtacagggatcgccggaacgtcccaggcaaacgccagagaacgccccacggtcgcgccaaccagtagcgcgccgactaatccagggcctgcggtataggccacagcatcaatgtcttttgccgttaaaccagactcctttagcgccgcctggatcaacggtacggttttacgcacatgatcgcgggaggccagttcaggcacgacgccgccgtagtcagcgtgcaatttcacctgactatacaattggttggctaacaaacctttttcatcgtcgtaaatggcgatgccggtttcatcgcaggaagtttcaatacccagtacacgcatgacttgttttacctcgctttattaccgcgcagtgtaggaccaatgcgggttgatgtaaaactttgttcgcccctggagaaagcctcgtgtatactcctcacccttataaaagtccctttcaaaaaaggccgcggtgctttacaaagcagcagcaattgcagtaaaattccgcaccattttgaaataagctggcgttgatgccagcggcaaaccgaattaatcaaaggtgagaggcacatgccggtaattaaagtacgtgaaaacgagccgttcgacgtagctctgcgtcgcttcaagcgttcctgcgaaaaagcaggtgttctggcggaagttcgtcgtcgtgagttctatgaaaaaccgactaccgaacgtaagcgcgctaaagcttctgcagtgaaacgtcacgcgaagaaactggctcgcgaaaacgcacgccgcactcgtctgtactaattccccgagagcgttgctctccgatcagaccgagttgtagttgtaaggccgtgcttccgaaaggaatgcgcggcttattttcgtttatgaattgctaaaaatcggggcctatggctggacgaatcccacgcgtattcattaatgatctgctggcacgcactgacatcgtcgatctgatcgatgcccgtgtgaagctgaaaaagcagggcaagaatttccacgcgtgttgtccattccacaacgagaaaaccccgtccttcaccgttaacggtgagaaacagttttaccactgctttggatgtggcgcgcacggcaacgcgatcgacttcctgatgaactacgacaagctcgagttcgtcgaaacggtcgaagagctggcagcaatgcacaatcttgaagtgccatttgaagcaggcagcggccccagccagatcgagcgccatcagaggcaaacgctttatcagttgatggacggtctgaatacgttttaccaacaatctttacaacaacctgttgccacgtctgcgcgccagtatctggaaaaacgcggattaagccacgaggttatcgctcgctttgcgattggttttgcgccccccggctgggacaacgtcctgaagcggtttggcggcaatccagaaaatcgccagagtttgattgatgcggggatgttggtcactaacgatcagggacgcagttacgatcgtttccgcgagcgggtgatgttccccattcgcgataaacgcggtcgggtgattggttttggcgggcgcgtgctgggcaacgatacccccaaatacctgaacagcccggaaacagacattttccataaaggccgccagctttacggtctttatgaagcgcagcaggataacgctgaacccaatcgtctgcttgtggtcgaaggctatatggacgtggtggcgctggcgcaatacggcattaattacgccgttgcgagcttaggtacgagtaccaccgccgatcacatacaactgttgttccgcgcgaccaacaatgtcatttgctgttatgacggcgaccgtgcaggccgcgatgccgcctggcgagcgctggaaacggcgctgccttacatgacagacggccgtcagctacgctttatgtttttgcctgatggcgaagaccctgacacgctagtacgaaaagaaggtaaagaagcgtttgaagcgcggatggagcaggcgatgccactctccgcatttctgtttaacagtctgatgccgcaagttgatctgagtacccctgacgggcgcgcacgtttgagtacgctggcactaccattgataagccaagtgccgggcgaaacgctgcgaatatatcttcgtcaggaattaggcaacaaattaggcatacttgatgacagccagcttgaacgattaatgccaaaagcggcagagagcggcgtttctcgccctgttccgcagctaaaacgcacgaccatgcgtatacttatagggttgctggtgcaaaatccagaattagcgacgttggtcccgccgcttgagaatctggatgaaaataagctccctggacttggcttattcagagaactggtcaacacttgtctctcccagccaggtctgaccaccgggcaacttttagagcactatcgtggtacaaataatgctgccacccttgaaaaactgagcatgtgggacgatatagcagataagaatattgctgagcaaaccttcaccgacagtctcaaccatatgtttgatagcctgcttgaactgcgccaggaagagttaatcgctcgtgagcgcacgcatggtttaagcaacgaagaacgcctggagctctggacattaaaccaggagctggcgaaaaagtgatttaacggcttaagtgccgaagagcgatcgggaagcccccgacagccgcactgagaggcagcggcaaatatataagtacgccctcgtaattatcgttggcggtaaacaaccgttggatttcagcgttaacggctgaaggacatcgggtcaatcgcccaacaccaacctcatgaaataagtgtggataccgtcttatggagcaaaacccgcagagtcagctgaaacttcttgtcacccgtggtaaggagcaaggctatctgacctatgccgaggtcaatgaccatctgccggaagatatcgtcgatagtgatcagatcgaagacatcatccaaatgatcaacgacatgggcattcaggtgatggaagaagcaccggatgccgatgatctgatgctggctgaaaacaccgcggacgaagatgctgccgaagccgccgcgcaggtgctttccagcgtggaatctgaaatcgggcgcacgactgacccggtacgcatgtacatgcgtgaaatgggcaccgttgaactgttgacccgcgaaggcgaaattgacatcgctaagcgtattgaagacgggatcaaccaggttcaatgctccgttgctgaatatccggaagcgatcacctatctgctggaacagtacgatcgtgttgaagcagaagaagcgcgtctgtccgatctgatcaccggctttgttgacccgaacgcagaagaagatctggcacctaccgccactcacgtcggttctgagctttcccaggaagatctggacgatgacgaagatgaagacgaagaagatggcgatgacgacagcgccgatgatgacaacagcatcgacccggaactggctcgcgaaaaatttgcggaactacgcgctcagtacgttgtaacgcgtgacaccatcaaagcgaaaggtcgcagtcacgctaccgctcaggaagagatcctgaaactgtctgaagtattcaaacagttccgcctggtgccgaagcagtttgactacctggtcaacagcatgcgcgtcatgatggaccgcgttcgtacgcaagaacgtctgatcatgaagctctgcgttgagcagtgcaaaatgccgaagaaaaacttcattaccctgtttaccggcaacgaaaccagcgatacctggttcaacgcggcaattgcgatgaacaagccgtggagcgaaaaactgcacgatgtctctgaagaagtgcatcgcgccctgcaaaaactgcagcagattgaagaagaaaccggcctgaccatcgagcaggttaaagatatcaaccgtcgtatgtccatcggtgaagcgaaagcccgccgtgcgaagaaagagatggttgaagcgaacttacgtctggttatttctatcgctaagaaatacaccaaccgtggcttgcagttccttgacctgattcaggaaggcaacatcggtctgatgaaagcggttgataaattcgaataccgccgtggttacaagttctccacctacgcaacctggtggatccgtcaggcgatcacccgctctatcgcggatcaggcgcgcaccatccgtattccggtgcatatgattgagaccatcaacaagctcaaccgtatttctcgccagatgctgcaagagatgggccgtgaaccgacgccggaagaactggctgaacgtatgctgatgccggaagacaagatccgcaaagtgctgaagatcgccaaagagccaatctccatggaaacgccgatcggtgatgatgaagatagccatctgggggatttcatcgaggataccaccctcgagctgccgctggattctgcgaccaccgaaagcctgcgtgcggcaacgcacgacgtgctggctggcctgaccgcgcgtgaagcaaaagttctgcgtatgcgtttcggtatcgatatgaacaccgactacacgctggaagaagtgggtaaacagttcgacgttacccgcgaacgtatccgtcagatcgaagcgaaggcgctgcgcaaactgcgtcacccgagccgttctgaagtgctgcgtagcttcctggacgattaatcggtaggccggatcaggcgttacgccgcacccggcactaggccctctgcacaaacgccaccttttcggtggcgttttttatcgcccacgcactaccagcgcctggtccagctcgcgatacgcttcaaccagtttctccagactaacgcgacttaaaccgctgggatttggcagcacccaaatctgcgtgctaccaatggtgagcgtttgtttcccccactgtgcaccgcgctggctgaatccctgttcatatgcttgtttgcccagaatcgccaacgcctgcggctgataatcttcaattttttcaatcagcttacgcccgcctgcgtgtagctcctgcttactaacttcattggcttgcaccgttggacggtctaccagtttggtgacgccacaacgataatccagcagatgctgtgcctcctgcggcttcaactgacggtcggtaaacccggcctgatatatcaccttccagaagcgatttgccggatgagcaaagggaaaaccagtcccggcggaactaagcccagggttgataccgcaaaacacgacccgtaaccctggagccaaaatatcctcaaccatatttactcctttctaacatcaccaggaaaagtataacggattgaaaatacattgtttataaaaacagcaggcgcgcggtaatggctggattgcgacacggagttactttataatccgctaccatggccccttagctcagtggttagagcaggcgactcataatcgcttggtcgctggttcaagtccagcaggggccaccagatatagcaaaggctgacgagaaatcgtcagcctttttctttttatatatcagttactttgcgtgccagtaagccgctgcacgtacccgctgtgggtcatactgttccgcttcaaagcggcggcttaaattcttaacgactttaccttcgccggttatccagatgaagtaatcatcggcagggatttgcatctgcgccagacgcgcatctaccgcctgctcatcatgtgccagccattcgatattaaaaccatcaaggtgcgcgagataatcctgacaggcgttatcccgcacgctaaccagcgcactaacttgcggtttaacggcaagtttgctcaacgtttccaggcggcggcgcaatgcaggcattccggattcatcgcagacatacagctgatacgcgtaatcttccggcaccaccaggctaccgcgcggacctgccaccgtaagtttatcgcccggttgcgcctgcatcgcccagccgctggcgaccccaccgtcgtgaataaagaaatcaatcgccagttcatggcgtagttcgtcatacagcggcgtatagtcacggctcggtgggcgtggtccttccggccagacgatgccctcttccgttaccgttggcggcacaaagtgagcgtcaggttgaggaaagaagagtttgctgtgatcgtcaaagccacggcttgtaaaaccgtccagcgcctcgccgccgaggacaatgcgctgaaaaccggcgctgatgcgctcaacgcgtaacacagtcagttcacggaagcgcagatcattgcgaacgcgctgcgggtagcggggggtgttattcattgttatcgccttcgtgatggtaatcagatatatctaaataaaactcgcaaatgataatgattgttaatcatgataaatgcaagcgatttgtagaactgatatgtctatagtctgataagacgaaccgcctcttctcaggcatcattactcaacgccggatgcggcgtgaacgccttatccggcctacgtgtgagatgagtccacgtttaaaaatcatttttacacttgcaagaacgctcatatcagatataaattagatatatctaattaagcaaaaggaggctgatatgagccatcatcacgaagggtgttgtaaacatgaaggccagccacgccatgagggctgctgcaaaggtgagaagagtgaacacgagcactgcggacacggtcaccagcatgaacacggtcaatgctgcggtggtcgccacggtcgcggcggcggtcgtcggcaacgtttctttggtcacggtgaattacgtctggtgattctggatattctcagccgcgatgacagccacggttacgaattgattaaagcgattgagaatctaacccaggggaattacaccccaagcccgggcgtcatctacccaacgctggattttctgcaggagcagagcctgattaccatccgcgaagaggaaggaggtaagaagcagattgcgctgaccgaacaaggcgcgcagtggctggaagaaaaccgcgaacaggtggagatgattgaagaacgcatcaaagcgcgttgcgttggcgcggcgctgcgccagaacccgcaaatgaagcgggcgctggataattttaaagcggtgctggatttacgcgtcaaccagagcgatatcagtgatgcacaaataaaaaagatcattgcggtgatcgaccgcgccgcttttgatattacgcaactggattaatcgccgcatccgccagtggcgcggtgcaattgccggatgcgacgcttgacgcgccttatccggcctacacccgctacacaccccgcaggcctgataagatgcgccagcatcgcatcaggcattgtgctccaaccgccggatccggcataccgattaatgcagtaccgtcaccgcgtcttccagtcggctggcgcggtgtttcaccatcgcgctcacctgcgcactctcttccaccagctcggcatttttctgggtgatcaggttaagctcatccactgcacgggtcaggctggaaagcccatcggcctgttccagcgtactatggctaatctgggcgatcaactgggtgacgtttttcacctgtgccacaatatcttccatcgtccgtccggcggcgtgtacctgctggctaccggattgcaccttatcagcactggcatcaatcagcttgcgaatatcgttggcagcattagcgctgcggctggctaaatgacgcacttcccctgccaccactgcaaaacctttgccctgttcgccggcacgcgccgcttccaccgccgcattcagggccagaatattggtctgaaacgcaatatcgttaatcaggctagtaatggtgccaatgcgctgggtactgtcggcgatatcgtccattgtcttgatcaccgtggtcatcgcctccccaccctgcactgccgcattactggcagtgatactcagtttatcggcagcgctcgccgtggcagagttctgtttcacgctcgccgccatttggttcatggtcgccaccgtttgctgaacgttatcaactgtctgctgggtatgttcgttcagttcatcggtgcctttcgccagcgtctcactgccatttctgacactggacacctggctactgacatcgttaattagccaacggcacatcaggccaagttgccctaccgcacgtaatgtcagccccagctcatcgctgcgattcagatgctcaacactattacgttctccggtcgccaccttcagtgcctgatgggcaacattttctatcgggcgcacaatctgccattcaaaacaggcgcttgccaacaataccactaacgcacagaggatatacgtcaccaccggggcagcaacaaaccaaagcatggccgccagcaagataaacatcagggtcatcactccacgcgcccgccagcgaagcggtaaactaggcagtttacccagccagcctttacgcaccaccaggcctttatgaatacgcttactggtacgtccggcgttcaacgctttgtacagcggctccaccgccgcgatctcttcatccgtcgcccgggtacgaatgctcatatagccactgatttttccctcgcgcaccatcggtaccgcattggcccgcacccaataatggtcaccatttttgcggcgatttttcacgatgccgctccagggctccccttttttcagggtgaaccacatatccgcaaacgccgcttttggcatatccgggtgacgcaccatgttgtgcggctgcccttgtaactcttgcaaggtatagccgctcacctgcacaaaagtgtcattagcatgagtgatatagctttgcagatcggtagtggacatcagagtggtatcgtccgccagcggggtattttgctgggtgacatacggatgagaagacatgttcgcgtcctgtgcaggttatatggttgttaacttcttgtcagagtttatgtcggccccgctgcggttatctttaaccgattaatttgatttagatcgcaatttgcgatttaaacacaaatctaattccttgatttaaaatactttcactctgttactatacgaaaacgttaattatcttgcccaaaaatcaggcaattattgccctgaaaacgtgcatttgcgcagcaatcatcaaatccatacccgacaaaaaccgtgcaaaataacaacaaatgttaacagatagcattaaatattgcacaaatgataaccgaatttgtgtttatcccgattttcgcgatcgcagccggagtggcgcaatccctgcaatacttaaatcggtatcatgtgatacgcgagcctccggagcatattttgaacaggttacctagcagcgcaagcgctttagcgtgcagcgcccacgccctgaatctcattgagaagcgaacgctggatcatgaggagatgaaagcacttaaccgagaggtgattgaatacttcaaagagcatgtcaatccggggtttttagagtatcgcaaatctgttaccgccggcggggattacggagccgtagagtggcaagcgggaagtttaaatacgcttgtcgacacccagggccaggagtttatcgactgcctgggaggttttggaattttcaacgtggggcaccgtaatccagttgtggtttccgccgtacagaatcaacttgcgaaacaaccgctgcacagccaggagctgctcgatccgttacgggcgatgttggcgaaaacccttgctgcgctaacgcccggtaaactgaaatacagcttcttctgtaatagcggcaccgagtccgttgaagcagcgctgaagctggcgaaagcttaccagagtccgcgcggcaagtttacttttattgccaccagcggcgcgttccacggtaaaagtcttggcgcgctgagcgccacggcgaaaagcaccttccgcaaaccgtttatgccgttactgccgggcttccgtcatgtgccgtttggcaatatcgaagccatgcgcacggctcttaacgagtgcaaaaaaaccggtgatgatgtggctgcggtgatcctcgaaccgattcagggtgaaggtggcgtaattctgccgccgccgggctatctcaccgccgtacgtaagctatgcgatgagttcggcgcactgatgatcctcgatgaagtacaaacgggcatggggcgcacgggcaagatgttcgcctgcgagcatgagaacgtacagccggatatcctctgccttgccaaagcgctcggcggcggcgtgatgccgattggcgcgaccatcgccactgaagaggtgtttagtgttctgttcgacaacccattcctgcataccaccacctttggcggcaacccgctggcctgtgcggcggcgctggcgaccatcaatgtgttgctggagcagaacttaccggctcaggctgagcaaaaaggcgatatgttgctggacggtttccgtcaactggcgcgggaatatcccgatctggtacaggaagcgcgtggtaaagggatgttgatggcgattgagtttgttgataacgaaatcggctataactttgccagcgagatgttccgccagcgcgtactggtggccggaacgctcaataacgccaaaacgatccgcattgaaccgccactgacactgaccattgaacagtgtgaactggtgatcaaagcggcgcgtaaggcgctggcggccatgcgagtaagtgtcgaagaagcgtaatatcaaatcggatggcgatacgacgtcgccatccgatctttttatacgacgcgtacgcccgcaggcatcatccgctccggcgttaacagcacgctttcactgccgtcatcggtttccgcacacaacagcatgcattcgctcgtttcaccacgcattttcgctttttgcagattgcataagaccaccaccgttttccccatcagctcttcttcgctgtagtacggcaccaggctggtcacggtttgcagcgttttttgccccacatcaacctgtacgatgtacagcttgtcggcgttttcatggcgtttcacttccacaatctttccgacgcgcatttccagacgtgcaaaatcagcgtaagccacggtttccattgcttcctcccttagggtaaaattttactaaactatagcaaaagtttttctcaatcctgtaggctaaaaatggagaatgcaggcgtgatcacattcgtgagccgctgtgttaccgttacagcgtcaaagaaacgcgctttatttactgaaaacaggtgacccgataagcacttcctctacaatgggggcgcacatcagggaaagtaaaaaaggtaaacatggcaacactaaaagacatcgcaatcgaagctggcgtatccctggcgacagtatccagggtcttaaatgacgatccgacattgaatgtgaaagaagagacgaaacatcgcattctcgagatcgccgaaaagctggagtacaagaccagtagtgcccgtaaactccagacaggtgcagtcaaccaacaccatattctggctatctacagctaccagcaggagctggagatcaacgatccttactatctggcgatccgccacggcattgaaacccagtgcgaaaagctgggcatcgagctcaccaactgttatgaacacagcggcttaccagacattaaaaacgtcaccggtattttaattgtcggcaaacccacgcccgccctgcgcgccgctgccagcgcgttgaccgacaatatctgttttatcgactttcacgaacccggcagcggttacgatgcggtggatatcgatctggcacgcatcagtaaagaaatcatcgacttctatatcaaccagggcgttaatcgtattggttttattggcggtgaagatgagcctggcaaggcggatattcgtgaggtcgcctttgcggaatatggccgactgaaacaagtggtacgcgaagaggatatctggcgcggcggtttttccagtagcagcggttatgaactggcaaaacaaatgctggcgcgggaagactatccgaaggcactgtttgttgcttccgattccattgctatcggcgtactgcgggcaattcatgaacgaggcctgaacatcccacaggatattagccttatcagcgttaacgatatccccaccgcgcgatttacctttccgccgctctccaccgtgcgcatccattccgagatgatgggaagtcagggcgttaacctggtgtatgaaaaagcccgcgatggtcgcgcgctgccgctgttagtcttcgttcccagcaaattaaaactgcgcggcacgacccgttaaatccccttacacactgtccggcaatcgtttttgccggacagtgctgccgtttattttcgtgatccagttaaagtaaatgcatttacctgctactttttagtaaaaattttactaaactccccagcaattacacaaactaccatcaccatgaatggttccgatttctctctaccgggaggccctatgaatcgctgggaaaacattcagctcacccacgaaaaccgacttgcgccgcgtgcgtacttttttagttatgattctgttgcgcaagcgcgtacctttgcccgcgaaaccagcagcctgtttctgcccttaagcggtcagtggaatttccacttttttgaccatccgctgcaagtaccagaagccttcacctctgagttaatggctgactgggggcatattaccgtccccgccatgtggcaaatggaaggtcacggcaaactgcaatataccgacgaaggttttccgttccccatcgatgtgccgtttgtccccagcgataacccaaccggtgcctatcaacgtattttcaccctcagcgacggctggcagggtaaacagacgctgattaaatttgacggcgtcgaaacctattttgaagtctatgttaacggtcagtatgtgggtttcagcaagggcagtcgcctgaccgcagagtttgacatcagcgcgatggttaaaaccggcgacaacctgttgtgtgtgcgcgtgatgcagtgggcggactctacctacgtggaagaccaggatatgtggtggagtgcggggatcttccgcgatgtttatctggtcggaaaacacctaacgcatattaacgatttcactgtgcgtaccgactttgacgaagcctattgcgatgccacgctttcctgcgaagtggtgctggaaaatctcgccgcctcccctgtcgtcacgacgctggaatataccctgtttgatggcgaacgcgtggtgcacagcagcgccattgatcatttggcaattgaaaaactgaccagcgccagctttgcttttactgtcgaacagccgcagcaatggagtgcagaatccccttatctttaccatctggtcatgacgctgaaagacgccaacggcaacgttctggaagtggtgccacaacgcgttggcttccgtgatatcaaagtgcgcgacggtctgttctggatcaataaccgttatgtgatgctgcacggcgtcaaccgtcacgacaacgatcatcgcaaaggccgcgccgttggaatggatcgcgtcgagaaagatctccagttgatgaagcagcacaatatcaactccgtgcgtaccgctcactacccgaacgatccgcgtttttacgaactgtgtgatatctacggcctgtttgtgatggcggaaaccgacgtcgaaagccacggctttgctaatgtcggcgatattagccgtattaccgacgatccgcagtgggaaaaagtctacgtcgagcgcattgttcgccatatccacgcgcagaaaaaccatccgagcatcatcatctggagcctgggcaatgaatccggctatggctgtaacatccgcgcgatgtaccatgcggcgaaagcgctggatgacacgcgactggtgcattacgaagaagatcgcgatgctgaagtggtcgatattatttccaccatgtacacccgcgtgccgctgatgaatgagtttggtgaatacccgcatccgaagccgcgcatcatctgtgaatatgctcatgcgatggggaacggaccgggcgggctgacggagtaccagaacgtcttctataagcacgattgcattcagggtcattatgtctgggagtggtgcgaccacgggatccaggcacaggacgaccacggcaatgtctggtataaattcggcggcgactacggcgactatcccaacaactataacttctgtcttgatggtttgatctattccgatcagacgccgggaccgggcctgaaagagtacaaacaggttatcgcgccggtaaaaatccacgcgcgggatctgactcgcggcgagttgaaagtcgaaaataaactgtggtttaccacgcttgatgactacaccctgcacgcagaggtgcgcgccgaaggtgaaacgctcgcgacgcagcagattaaactgcgcgacgttgcgccgaacagcgaagcccccttgcagatcacgctgccgcagctggacgcccgcgaagcgttcctcaacattacggtgaccaaagattcccgcacccgctacagcgaagccggacaccctatcgccacttatcagttcccgctgaaggaaaacaccgcgcagccagtgcctttcgcaccaaataatgcgcgtccgctgacgctggaagacgatcgtttgagctgcaccgttcgcggctacaacttcgcgatcaccttcagtaaaatgagtggcaaaccgacatcctggcaggtgaatggcgaaagcctgctgactcgcgagccaaagatcaacttcttcaagccgatgatcgacaaccacaagcaggagtacgaagggctgtggcaaccgaatcatttgcagatcatgcaggaacatctgcgcgactttgccgtagaacagagcgatggtgaagtgctgatcatcagccgcacagttattgccccgccggtgtttgacttcgggatgcgctgcacctacatctggcgcatcgctgccgatggccaggttaacgtggcgctttccggcgagcgttacggcgactatccgcacatcattccgtgcatcggtttcaccatgggaattaacggcgaatacgatcaggtggcgtattacggtcgtggaccgggcgaaaactacgccgacagccagcaggctaacatcatcgatatctggcgcagcaccgtcgatgccatgttcgagaactatcccttcccgcagaacaacggtaaccgtcagcatgtccgctggacggcactgactaaccgccacggtaacggtctgctggtggttccgcagcgcccaattaacttcagcgcctggcactatacccaggaaaacatccacgctgcccagcactgtaacgagctgcagcgcagtgatgacatcaccctgaacctcgatcaccagctgcttggcctcggctccaactcctggggcagcgaggtgctggactcctggcgcgtctggttccgtgacttcagctacggctttacgttgctgccggtttctggcggagaagctaccgcgcaaagcctggcgagctatgagttcggcgcagggttcttttccacgaatttgcacagcgagaataagcaatgaggatcatcgataacttagaacagttccgccagatttacgcctctggcaagaagtggcaacgctgcgttgaagcgattgaaaatatcgacaacattcagcctggcgtcgcccactccatcggtgacagtttgacttaccgcgtggagacagactccgcgaccgatgcgctatttaccgggcatcgacgctattttgaagtgcattactacctgcaagggcagcaaaaaattgaatatgcgccgaaagagacattacaggtagtggaatattatcgtgatgaaactgaccgtgaatatttaaaaggctgcggagaaaccgttgaggtccacgaagggcaaatcgttatttgcgatatccatgaagcgtatcggtttatctgcaataacgcggtcaaaaaagtggttctcaaagtcaccatcgaagatggttatttccataacaaataacaactacggcggcaaaaggagtttgccgccaccgctaccctactcattttcggagatgtgttatgtctgataccaaacgtaatacaatcggcaaattcggcttgctcagcctgacttttgccgccgtttacagctttaacaacgttatcaataataatattgagcttggactggccagcgcaccgatgtttttcctcgcgacgattttttattttattcccttctgtctgatcatcgcagaatttgttagcttaaataaaaacagtgaagccggtgtctacgcgtgggtaaaaagtagcctgggcggacgttgggcatttattactgcctatacctactggttcgtaaacctgttctttttcaccagtctgttgccgcgcgttattgcttatgctagctatgccttcctcggatacgaatatattatgacgccggttgccaccaccattatcagtatggtgctgttcgccttctccacctgggtttccaccaacggggcgaaaatgttggggccaattacctccgtcactagtacgctgatgctgctgttaacgctctcctacattttactggcaggtacggcgctggttggcggcgtacagcctgctgacgccatcaccgttgacgcgatgatcccgaacttcaactgggcgttcctcggcgttaccacctggatctttatggccgcaggtggcgcggagtccgtcgctgtgtacgttaacgacgtcaaaggcggtagcaaaagcttcgttaaagtgatcatcctcgccgggatttttatcggcgtactgtattccgtctccagcgtgctgattaacgtcttcgtcagcagcaaagagttgaaatttaccggcggaagcgtgcaggtattccacggcatggcggcgtattttggtctaccggaagcgttgatgaatcgctttgtcggtctggtgtcctttaccgcgatgttcggttccctgctgatgtggaccgcaacgccggtgaaaattttcttctccgaaatcccggaaggcatctttggtaagaaaaccgtcgaactgaacgaaaacggcgttccggcgcgcgcagcgtggatccagttcctgatcgtcatcccgctgatgattatcccgatgctcggttccaataccgtgcaggatctgatgaatactattattaatatgaccgccgcagcgtccatgcttccgccgttattcatcatgctggcttacctgaatttacgcgccaaattagatcacctgccacgcgatttccgtatgggctcccgccgcaccggtattatcgttgttagtatgctgattgcgatatttgccgtagggtttgtcgctagcacattcccgactggcgcgaatattctgaccatcattttttataacgtcggcggtattgttatcttccttggctttgcgtggtggaaatacagtaaatatataaagggattaacggctgaagagcgccatattgaagcgacgccagccagcaatgttgattaagcagaataataaaaaatgagcaggcattttccctcttcctggatgaggagagggaaaatagtttctgcctttatatttttataattacaacgataaaaggctgtactttttctttagctcatggattaacacaatgaaattaatcactgcaccatgcagagcattacttgctctgccgttttgctacgccttttctgcggcaggagaagaagcacgtccggcagaacatgacgacacaaaaacacccgcaattaccagcacatcttctcctagttttcgtttttacggcgaattaggggttggtggatatatggatttagagggtgagaataaacataaatacagcgacggtacctatattgaaggtggcctggagatgaagtacggctcctggttcggcctgatttacggcgaaggctggaccgtgcaggccgaccacgacggcaatgcctgggtgccagaccatagctggggtggtttcgagggcggaattaaccgtttctatggcggttatcgtaccaatgatggcaccgaaatcatgctcagtctgcgtcaggattccagcctggatgacctgcaatggtggggcgatttcacccccgatctgggctacgtcattcccaatacccgcgacattatgactgcgctgaaggtacagaacttaagcggcaactttcgttatagcgtcaccgcgactcctgccggacatcatgatgaaagcaaagcctggctacattttggcaaatacgatcgctatgacgacaaatacacctatccggcaatgatgaacggttacatccagtatgaccttgccgaaggcatcacctggatgaacggtctggaaatcaccgacggcacaggacagctctatctcacgggcctgctaactcctaactttgccgctcgcgcctggcaccataccggacgcgccgacgggctggacgtaccgggaagtgaaagtgggatgatggtgagcgccatgtatgaagcgttaaagggcgtttatctctccaccgcttacacctacgccaaacatcgccctgaccacgctgacgatgaaaccacctctttcatgcagtttggtatctggtacgaatacggcggcggacgtttcgccacggcttttgatagccgcttctacatgaaaaatgcctctcacgatcccagcgaccaaatcttcctgatgcaatatttctactggtaataaggactgtaatttcatgaaaataaaaactattttaacgccagtaacctgcgctctgctgataagtttttccgcccatgccgctaacgccgacaattataaaaacgtgattaaccgtactggcgcgccgcagtacatgaaggattacgattacgacgatcaccagcgttttaatccgtttttcgatctcggagcctggcatggtcatctgttgccagacggccctaacaccatgggcggctttccgggcgttgcgctgctgacggaagagtacatcaactttatggccagcaatttcgaccgcctgaccgtctggcaggacggcaagaaagtcgactttacgctggaggcatacagtattcccggtgcgctggtgcaaaaactgacagcaaaagatgtgcaagtcgaaatgactctgcgcttcgccacgccgcgcacgagtctactggaaaccaaaatcaccagcaataaaccgctggatctggtgtgggacggcgaactgctggaaaaactggaagcgaaagaagggaaaccgctttccgataaaaccattgctggcgaatgccctgactatcagcgcaaaatcagcgccacccgtgatggcctgaaagtcacctttggcaaagtgcgcgccacctgggatctgctgacctccggcgaaagcgaatatcaggtgcataaatccctgccggtgcagactgaaatcaacggtaatcgctttaccagtaaggcgcatatcaacggtagcaccacgctctacaccacctattcccatctgctgaccgctcaggaagttagcaaagagcaaatgcagatccgcgatattctggcgcgtccggcgttttatctcaccgccagccagcaacgctgggaagaatacctgaagaaagggttaaccaatccggatgcgacgccggaacagacgcgcgtcgcggtgaaagcgatcgaaacgctcaacggtaactggcgcagtccgggcggtgcggtgaaatttaacaccgttacaccgagcgtgaccgggcgctggttctccggcaatcagacctggccgtgggatacctggaagcaggcgtttgcgatggcgcatttcaatccggacatcgccaaagagaatatccgcgcggtcttctcctggcagatccagcctggcgatagcgtgcgtccgcaggatgtgggctttgtccccgacctgatagcgtggaaccttagccccgagcgtggtggcgatggcggcaactggaacgaacgtaataccaaacccagccttgccgcctggagcgtgatggaagtgtataacgtcacccaagataaaacctgggtggcagagatgtacccgaaactggtggcctatcacgactggtggttacgtaaccgcgatcacaacggcaacggcgtgccggaatatggcgcgacccgcgacaaagcccacaacactgagagcggcgagatgctgtttacggtgaaaaaaggcgataaagaagagacgcagtctgggctgaacaactacgcccgcgtggtggagaaaggccagtacgacagtctggaaattccggcacaggttgctgcaagctgggaaagcgggcgtgatgatgccgccgtctttgggtttatcgacaaagaacagttggataaatatgtcgctaatggcggcaaacgtagcgactggacggtgaaattcgccgaaaaccgcagtcaggacggaacgttgctgggctacagcctattgcaggagagcgtggatcaggccagctatatgtacagcgataaccattatctggcggagatggcaaccatcctcggtaagccagaagaggccaaacgctatcgccagttggcacagcagctcgcggactacatcaacacctgtatgttcgacccgactacccagttctactatgacgtacgtattgaagataaaccactggcgaacggctgcgcgggcaaaccgattgttgagcgcggtaaagggccggaaggctggagcccgctgtttaacggtgcggcaacgcaggccaatgccgacgcggtggtgaaggtgatgctcgatcctaaagagttcaacacctttgtcccgctgggaacggcggcgttaaccaatccggcttttggcgctgatatctactggcgtgggcgcgtatgggtggatcagttctggtttggtctgaaagggatggagcgttacggttatcgtgatgatgccctgaagctggcggatacgttcttccggcacgccaaagggttaaccgccgatggaccaattcaggaaaattacaacccgctgacaggcgcacagcaaggcgcaccaaatttctcctggagtgccgcgcatttgtatatgttgtataacgattttttccgtaagcaataatttgcaactgctggcggatgcggcgtaaacgccttatccgccctacatgtgcaatcctcctggccggataaaacgcggcaagcgttgcatccggcaactgcaccgcgccactggcggatgcggcgtgaacgccttatccgccctacatgtgtgttcccgtaggtcggataagacgcgacaagcgtcgcatccggcatctgcaccgcgccactggcggatgcggcgtggacgccttatccgccctacatgtgcaattccgtaacctggataaaacgcgacaagcgtcgcatccggcgttatcaccgggcgtattctttttgaatcccatcacaaaccccgcactccccttttcccttttctccggcgacggctaaattagaactcatccgaccacataacaattattttacatactggacaattttatgagctacccgagcctgttcgccccgctggatttaggttttaccacgttaaaaaaccgcgtgttgatgggcagtatgcacaccgggctggaggaatacccggacggtgccgagcggctggcagcgttttatgccgaacgcgcccgtcacggcgtggcgctgattgtcagcggcggcattgcaccagatttaacaggcgttggcatggaaggtggcgcaatgctcaacgacgccagccagatcccacaccatcgcaccattaccgaagcggtacatcaggaaggcggcaaaatagccctgcaaattttgcataccgggcgctacagctaccaaccgcatctggtcgccccgtccgcattgcaggcccccatcaaccgtttcgtgccccatgagttaagccatgaagagatcctgcaactgatcgacaatttcgcccgctgcgcgcaactggcgcgggaggcaggatacgacggtgtagaggtgatgggttccgaagggtatttgatcaacgaatttctgacgctgcgcaccaatcagcgtagtgaccagtggggcggcgattaccgcaaccggatgcgatttgccgtagaagtagtgcgtgcggtgcgcgaacgcgtcggcaacgacttcattattatctaccgactgagcatgctcgacctggtcgaagacggcgggacttttgccgaaacggtagagctggcgcaggccattgaagcggcgggcgcgaccattatcaacaccggcattggctggcatgaagcacgtattccgaccattgccacgcccgtgccgcgcggcgcatttagctgggtcacgcgcaaactgaaaggccacgtcagcctgccgctggtaaccaccaaccggattaacgatccgcaggttgccgacgatattctcagccgcggcgatgccgatatggtaagcatggcgcgaccgtttcttgctgatgcggagctgctgagtaaagcgcaaagcggacgagccgatgagatcaacacttgtattggctgcaatcaggcctgtctcgatcaaatcttcgttggcaaagtcaccagctgcctggtgaatcctcgcgcctgccacgaaaccaaaatgccaatccttcccgccgtgcagaaaaaaaatctggcggtggtcggtgcgggacctgctgggctggcgtttgccattaacgcggcggcgcgtgggcatcaggtaacattgtttgacgctcatagcgagattggcgggcagtttaatatcgccaaacagatccccggcaaagaggagttttacgaaacgctgcgctattaccgccggatgatcgaagtgacgggcgtgacgctaaaactcaatcacaccgtgacggcggatcagttacaggctttcgatgaaacgatcctcgccagtgggatcgtgccgcgcactccgcccatcgacgggatcgatcatccgaaggtattgagttatctcgatgtactgcgcgacaaagcgccggttggcaacaaagttgccatcatcggttgtggcgggattggttttgatacggcgatgtatttaagtcagccgggcgaatccaccagccagaatatcgccgggttctgtaatgaatgggggatcgacagtagcctacaacaggctggtggcttaagcccgcagggaatgcagatcccccgtagcccacggcagattgtgatgctccagcgcaaagccagcaaaccaggacaggggttaggcaaaaccaccggctggatccatcgcaccaccctgctcagccggggtgtgaaaatgatcccaggcgtaagttatcagaagattgacgatgacgggctgcatgtggtgatcaacggcgaaacgcaggtattagcagtggacaatgtggtgatctgcgcagggcaagagccaaaccgcgcgctggcgcaaccgctgattgatagcgggaaaacggtgcatttaattggcggctgcgatgtggctatggagctggacgcacgacgggcaattgcccagggaacacggctggcgctggagatttaaatcgttatttgaagcgccggatgcaacgcatccggcacgtcgcgttaatcaataaacaaggcgggagaaatgccgaatcgcgttgccaattttttagcgtgttccagcgttaatttcctcttcccgctcaaaacgcgactcaccatagatttactgccaatttccggcagatcggaaagggttaaaccatattgatccataagggtacgaatcacggctataccgccaggcatggcttgagccatggcattaaattccgcaaattcgggcgcactttcttcccacgcggttattttggcacacaccagatccagcaaggggttttcaggatcgttgagcagcagatgatctaccagttccagcgcctgggtgtattgttcctcgttctgaatacccgccagaaaaggtgccacagcagttagcttttctcctgcttgcaagatgtcggcaatcgcaatcattttttccccttagtacgatgaacagcggtaaagaaatcgtattctttatgcgtcataacttcacgtatgtagcacttttggctttcaaaaaagaccattgctacaacacgtaattcattgcccccaacattgaaaacataatgcttatccagatatttgaagttatccagagatgggaatactgcttttaaactctcaggttttttgaaatatcccttagcaatcgtgttccccagagccaccaactccgttttatgttgcgggtatttttccgcagcatctttcaatgctttttgagttatcaggtgcattcttcatcacgtccgttgacaaattggcaatatgataacatccgttgccagattggcaacggatgaatttatctgtgtgacggaagaataaacgtagaaaaacgctaaacaagagaatgtagacgatggtgacagggattttttgttttatggaagcgcgattccagaactgggcagacattgccggatgcgacgcttgccgcgtcttatccggcctggagtaacgtgctgaacgtaggccggataaggcgtttacgccgcatccggcaggtaactcccaatcttaccgacgacgtcccagcttcaccgctttcagtaccacaaatttattattcgtcgcaatagtggtgcagttgccgaaaatcttcttcagtttatggaagtaatccaggtgacggttggcaacgatatacagctcgccgttgattttcaggcagcggcgggcgtggtggaacatctcccaggcgacgttatcggtcagcgcatgttgttggtgaaacggcgggttgcagagcacagcattaaagcggaaaggctccacgccggagagcgcgttgttgatcataaactcgcagcgatccaacgcctctggcatgttggtttcaacgttcaaacggctggaagcaaccgccatcgggctttcatcgacaaacaccactttcgcctgcgggtttttatcaagcagcgtcagaccaataacgccattaccgcaaccgagatcgacaatctccccttcgagattctctggcagatgttgcataaagaagcgcgcgccgatatcaagcccggtgcgggagaagacattcgcatggttgtggatagtccagtcagtaccttccagcttccagctaacggtctgcggcgcatcggccagctgcggttcattgaaagtgcaattaatcaggcgcgcttttttccatgccagcgtggtggtggttgggccgagcactttttcgaacagttccagcgtggaagtgtgaatgtcacgggccttggcaccggcaataatacgtgtatcgctcgtgaccactttgcgcagcgcacgcagttgctgttccagcaatgccagtgttttcggcactttgatcagcaccacacccggctgttgcgggtagtcggcggtgctgtcgagaaacttcacgctgctctcatcaatcccgttgaggcgtaaattctcgcgcgtcgccagttcactgatgtaactgtcgccaatgctgtacggcttatgttccgccagtgcgcagcttaacgcaccaaaggcatcattcaggatcaacaccgggccgcggatttctgtgtcgtccaactgttgcagcaaatattcatccgccgcttcccacgcctgtagcgggttaacgtcatccgtcgccggaaaacgttgtagtgtcagactacggaaaccgttgtctaagtggctcatcggccctcctgaatgataaaatttcgacattgcccctgaaaagggtgcgtgagtataccctttttctctttttcgtgggcggttatgagcaatcttacttatcttcagggttatcccgagcagctactttcccaggtgcgaacactgattaacgaacagcgtctgggcgatgtgctggcaaaacgctatccgggaacacacgactacgccaccgataaagccctctggcaatatactcaggatctgaaaaatcagtttctgcgtaatgccccgccgatcaataaagtgatgtatgacaataagatccatgtgctaaaaaacgcgctcgggttacataccgctgtttctcgtgtgcagggcggcaagctgaaagcaaaggtggagatccgcgtcgctaccgtgtttcgcaacgcgccggaaccgtttttgcgcatgatcgtggtgcacgagctggcgcacctgaaggagaaagagcataacaaagcgttttaccagttgtgttgtcatatggaaccccagtaccaccagcttgagttcgacacccgactgtggctaacgcagttgagccttgggcagaacaaaatctgaaaatgatgtcaggcgttatcttttctttctttagcgcctaaaatcgacctcccccctttcgttaaggataacgaccatgctgcgcgcatttgcccgccttcttctccgtatttgtttttctcgccggactctaaagattgcctgcttactgttacttgtggcaggagcgaccatccttatcgccgatcgcgtaatggtcaacgccagcaaacagctgacctggagcgatgtcaacgccgttccggcgcgtaacgtgggtttattgctgggggcgaggccgggtaatcgctactttacccgacgtattgataccgcagcagcgttgtaccacgccggaaaagtgaaatggctgctggtaagtggcgataacggacgtaaaaattacgatgaagcaagtggtatgcagcaggctttgatcgctaaaggcgtaccagcaaaagtgatcttctgcgactatgccggattcagtacgctggatagcgtagtgcgtgccaaaaaggtttttggtgaaaaccatatcaccattatcagccaagaatttcataatcaacgcgccatctggctggcaaaacagtacggcatcgacgctatcggttttaacgcgccagacctcaatatgaagcacggtttttatactcaactgcgggagaaactcgctcgtgtcagcgccgtgattgacgccaaaatcctccatcgccagccgaaatatctcgggcctagcgtcatgattgggccgtttagtgagcatggctgtccggcgcagaaataatgcgtatctgcgcacgtcgaagatgaaaaaggcgtgctacattgacgacagaatccctttatggagtatccacgcgttatgatacgtttcgctgtgattggtacgaactggatcactcgccagttcgtcgaggccgcccatgagagcggtaaatacaagttaaccgccgtatattcccgcagccttgaacaggcccagcacttcgccaatgatttttctgtcgagcatctgtttaccagcctggaagcgatggcggaaagcgatgccattgacgcggtgtatattgccagcccgaattccctgcatttttcccagacacaacttttccttagccataaaattaatgtgatttgcgagaaaccgctggcgagcaatctggcggaagtggatgccgccattgcctgtgcgcgggaaaatcaggtggtgctgtttgaggcatttaaaaccgcctgcctgccgaactttcatttgttgcgccaggcgctgccgaaagtcggcaaactgcggaaagtctttttcaactattgccagtattccagccggtatcaacgttacctggatggtgagaatcccaacacctttaatccggcattctctaacggtagtattatggatatcggtttttactgtctggcgagcgcggtggcgttatttggtgagccgaaaagcgtgcaggcaaccgccagtttgctggcaagcggcgttgacgcccagggcgtggtggtgatggattacggtgatttcagcgtcaccttgcagcacagtaaagtcagtgattctgtcctggcgagcgagattcagggcgaagcaggaagcctggtgattgaaaaactgtctgaatgccagaaagtgtgcttcgtgccgcgtggcagccaaatgcaggatctcacccagccgcagcatattaataccatgctctacgaagcagagctgttcgctaccctggtggatgagcatctggtggatcatccagggctggcggtcagtcgcatcaccgccaaactgctgaccgagatccgccgccagactggggtgatttttccggcagatagcgtaaaactataattgccaaagtaaaacagtgtaaaaggtatgtaacagaccattgactggctgaatggtctgtcatactttgttacctgcaaaggggagtaacttcattgccggtcgatcgtcattacgatgtgtgaaaaaacacatccggtcaccgggcaacccgaaaggaatacgcagacgtattccttttttgttgtaagtgagaccttgccggaaggcgaggtctatgcataaaaagcagcggctgacgtcttccgacgttggccgtttttttatgtgtaaggaacttctatgaatactgtcggcacgccgttgctatggggcggattcgctgttgttgtcgccattatgctggctatcgacctgttgttgcaggggcgtcgtggggcacatgccatgaccatgaaacaggctgcggcctggagcctggtctgggtgacgctgagcttactgtttaacgccgctttctggtggtatctggtgcaaaccgaaggtcgcgccgttgccgatccacaggcactggcctttctcacaggttatctgattgagaaaagcctggcggtcgataacgtctttgtctggctgatgttgttcagctatttctctgttccggcggcattacaacgccgcgtgctggtgtatggcgtgctcggggcgattgttctgcgtaccatcatgatcttcactggcagctggctaattagccagttcgactggatcctgtatatcttcggtgccttcctgctgtttaccggcgtgaagatggcgctcgcccatgaagatgaaagtggcattggcgacaagccgctggtgcgctggctacgcggtcatttgcgcatgaccgacaccatcgacaacgagcatttctttgtgcgtaagaatggattgctgtacgccacaccgctgatgctggtactgattctggtggaattgagcgacgtgattttcgccgtggatagcattccggctatcttcgccgtgaccactgacccgttcattgtgctgaccagtaacctgtttgcgatcctcggcctgcgtgcgatgtatttcctgctggcgggcgtagcagagcgtttcagcatgctcaaatatggcctggcggtgattctggtgtttatcggtatcaagatgctgattgtcgacttctaccatattccaatcgccgtcagcctgggcgtggtgtttggcattctggtgatgacgtttattatcaacgcctgggtgaattatcggcatgataagcagcggggtggataatttttaatctgcctaagccgtgtaccctgtcattaacatgagcaccgttttctccctctcccttccagggagagggtcggggtgagggtaatttttcgcaccgatgctggcctgttcccctcaccctaaccctctccccaaacggggcgaggggactgaccgagtccttttttgatgttgtcatcagtctggaagccgcacgttggctttatttttatgtcaaagaaatgtaaccattaagtttcaaaatatgacctctctttaaaatccagcatttttcgcttcccgaagctgtaactttccttatactcgaccttgcaaacactttgttacatcctgaaagatgcgtcgacagaacgcaccagggatgtgcgacaacacaatgaaaggatcgaaaaatgactacgcaacgtagtccggggctattccggcgtctggctcatggcagcctggtaaaacaaatcctggtcggccttgttctggggattcttctggcatggatcagtaaacccgcggcggaagctgttggtctgttaggtactttgttcgtcggcgcactgaaagccgttgcccccatcctggtgttgatgctggtgatggcatctattgctaaccaccagcacgggcagaaaaccaatatccgccctattttgttcctctatctactgggcaccttctctgctgctctggccgcagtagtcttcagctttgccttcccttctaccctgcatttatccagtagcgcgggtgatattagcccgccgagtggcattgtcgaagtgatgcgcgggctggtaatgagcatggtttccaaccccatcgacgcgctgctgaaaggtaactacatcgggattctggtgtgggcgatcggcctcggcttcgcactgcgtcacggtaacgagaccaccaaaaacctggttaacgatatgagcaatgccgttacctttatggtgaaactggtcattcgcttcgcaccgattggtatttttgggctggtttcttctaccctggcaaccaccggtttctccacactgtggggctacgcgcaactgctggtcgtgctggttggctgtatgttactggtggcgctggtggttaacccattgctggtgtggtggaaaattcgtcgtaacccgttcccgctggtgctgctgtgcctgcgcgaaagcggtgtgtatgccttcttcacccgcagctctgcagcgaacattccggtgaatatggcgctgtgtgaaaagctgaatctggatcgcgatacctattccgtttctattccgctgggagccaccatcaatatggcgggcgcagcaatcactattaccgtgttgacgctggctgcggttaatacgctgggtattccggtcgatctgcccacggcgctgctgttgagcgtggtggcttctctgtgtgcctgtggcgcatccggcgtggcgggggggtctctgctgctgatcccactggcctgtaatatgttcggtattagcaacgatatcgccatgcaggtggttgccgtcggctttatcatcggcgtattgcaggactcttgcgaaaccgcgctgaactctagtactgacgtgctgttcactgcggcagcttgccaggcagaagacgatcgtctggcaaatagcgccctgcgtaattaattgtttaacccctttcgtctacggcggaaggggttttctcaactttaaacggatcaattccccttttctgcatccgccagaaacgaatgatattcaggccattcataagcagaaaactaccctcaatcatcgtgccgcctatgctccccgcccagaagttgtgaatcacccagcaacacgtactaaaccacattacgcagcgcatggtcagccctttacagcagaatagcgcccaggtactgacaatcgtgccgataaccggcaatagttcgacaggatgatggaacttcgcgaggccaattccgccagtcagcacaataaaaatcgccattacccataagctgcgcgtgcgtaaggtaatcaatgtacgaatggcattaaggatggcactggcaccagcgggataggtgcccagaagaaaaaaatgtacgccaataacggcgctatagacgctaagctgctttttgaagcgacgttcgtcacgattgaaaaatgttgtgataccaatcagaaaggcgatgacacccacgccctgggccagccaatacgcggtcatgataaatccttagcaggtatggaaaagcaaacggcgcttcacattatgaaacgccgttttttattaacaactcatttcgactttatagcgttacgccgcttttgaagatcgccagttcgcggaagtcgttacgctcgttacaggtttgcttaccgttggcaaactcaacgatggtgtcgataaattcttccagcaactgcggcatcgctttaccgtggatcaactgacccgcgtcaaagtcgatccagtgttttttcttcgccgccagttcactgttggtggcgattttcaccgtcggcacaaatccaccatacggcgtgccacgaccagtactgaacagcaccatatggcagcccgcacccgccagggcgctggtcgctacggcatcgttacccggcgcacttaacaagttcagccctggcgttttcagacgctcgccgtaacgcagcacgtcaaccacgacgctggaacccgctttctgggtacagccaagacttttgtcttccagcgtggtgataccgcccgctttgttccccgggcttgggttttcatagatcggctgatcatgggcaataaagtactgtttgaagtcgttgaccatggtgaccagtttttcaaacgttgcttcgtcgcggcaatggtccatcagcaactgctctgcgccaaacatctccggcacttcggtcagtacggtagtaccgccgttagcaatcacgtagtcagagaaacgccccagcatcgggttagcagtaataccagaaagaccgtcagaaccaccgcactccagaccaaacttcagttcgctgagtttgcctggctcgcgtttatcgttgcgcatcacgttatacagctgatgcaaatgctcgattccggcttcgatctcatcatcctgctgttggcagatcatgaaatgaacgcgttcaggatcgatatcgcccagcgtttcacggaatgcggcaacctggttgttttcacagcccagaccaatcaccagcactgcgcctgcgttcgggtggcgcaccatgttttgcagcatggtgcgggtattaatgtgatcgtcgcccagctgactgcagccgtaggtgtggctgaagaggaacacgccgtcagtaccttcggcgttgttggtctctttcagaaaacggttctggatctgccgcgcgatgccgttgacacagcccacggttggcaggatccacagctcattacgcaccccgacatcgccgttagcgcgacgatagatctgcacttcacgatctgccgcttgcgcaggcagatcctgaaaatcaggttgatagcgatactgatccagatcgctcagattcgtgcgcgtattgtgggcgtgaacgtgaacacctgccgcaatatccgccaatgcataaccaatcggcaggccatatttgatgacattggccccttttgcgatatccgttaacgcaaatttatgtccacgagcaacatcctggcgcagcgtaacagtctggttatcgacactgacttctgtgccttcagccaaatctgctaaagcgaccgcgacgttatccagcgcatggatcttgatgtattgcatatcaaccccagaccttagttcagttcaatggcgaagtagtcacgcgcattgttaaagcaaatatttttcaccatctcgcccagcaggttgatgtccgccggtgcttcgcccgcttccacccagcgaccgatcatctggcacagaatgcggcggaagtattcgtgacgggtgtaactcaggaagctacggctgtcagtcagcataccgacaaagcggctcagcagaccgagctgcgccagttgggtcatctgacgttccataccgtctttctgatcgttaaaccaccagccggaaccgaactgcattttgcccggcataccttcgccctggaagttaccgatcatggtgcccagcacttcgttatcgcgcgggttcaggcagtacagaatggttttcggcagcaggttttcttcattctgcttgctcagcaacttagacagctcttccgccatcggacggtcgttgatggagtcaaagcctacatccggccccagcagtttgaactgacgcaggttgttattacgcagcgcgccaatgtggtactgctgtacccagccgcgacgtgcatattcggcaccaaggaacaccagtaccgcagttttgaactgcgccacttcgtgctcgctcagggtttcgccagccagacggcgcgccagaatgctgtccagttccgcttcgttcgcttcagcaaacatcaccacatccagcgcgtggtcagacactttacagccgtgagcggcgaagtgatccagacgtttggtcagggcagtttgcaggtcagcaaagcggcgaatgtcggtatcggaaacttcgcccagcttcgccatgtagtcgttaaaggtcgcctgttcgatgttgaaggctttgtccggacgccagctcggcagcactttgatggtgaaagagccgtctttggcgatctctgcgtgatgctccagagaatcgatcgggtcatcggtggtgccgaccattttcacgttcatctgctgcatgatgccgcgcgcggagaagttatcctgcgccagcagttcgttacattcgttccagatttcatcggcagtactcggagaaagcaatttgccagtgataccaaacggacggcgcagttcgaggtgcgtccagtggtataacgggttgccgatagtgtgcggaacagtcgccgcccaggcgtcaaatttttcacggtcagacgcatcaccggtacacagacgctcggccacaccgttggtacgcatagcgcgccatttgtagtgatcgcctttcagccagatgtcatacaggtttttaaaacgatagtcttccgcaatctgctgcggcggcaaatggcaatggtaatcgaaaatcggctggtcttttgcgtagtcgtgatacagacggcgggcaaattcggtatctaacaggaaatcttcagtcataaacggagtcattttcgtcttcctctcaacgagtgagctagcttgcttatggtgcgatgctgacaaagttatcacaccaatttccagagtccgaagatattttcgtgagttagatcaataaacgtagttaaaaaaattactctcaaagtggtaaatctcgctgcaggccgcgccagtactggccttgctgtcgtcaggtaatgtccctacaaatattcccacatttgtgatggctctcaccttttaaagttgtatgacaagttatctttctgccgtcgcaaatcataagtcgacggaatgcaaattgccgattcattcatttgttagatgaatcgggttaaccggtacggaagccgaattagcacgaaactttcatggcaacgttcggggcgtgccggttttttttcggttacccggtcgtaactaacatcttcagcctctggcgggatgatggccgcgcttcctgcggatataacaaaacgatgaggttttacatgcgtaaaattaaagggttacgttggtatatgatcgcactggtgacgctcggcaccgtgcttggttacctgacgcgtaacactgtggcggcagctgcgccaactctgatggaagagttaaacatctccacccaacagtattcctatatcatcgcagcctattctgctgcttatacggtcatgcaaccggtagcaggttatgtactggatgtgctgggtacgaaaatcggttatgcaatgtttgctgtgctgtgggccgtgttctgtggtgcaaccgcgctggcaggtagctggggtggcctggctgttgctcgtggtgcggtcggtgccgcggaagcagcgatgatcccggcgggtctgaaagccagctccgaatggttcccggcgaaagagcgttccatcgcagtaggctactttaacgtaggttctagcattggtgcgatgattgcgccgccgctggtggtatgggcaatcgtaatgcacagctggcagatggcatttatcatctccggtgcattgagctttatctgggcgatggcatggctgattttctataaacatccgcgcgaccagaagcatctgaccgatgaagaacgcgactatattattaatggtcaggaagcccagcaccaggtgagcacggcgaagaaaatgtccgttggtcagatcctgcgtaaccgtcagttctggggtatcgcgctgccgcgtttcctggcagaaccggcctggggtacttttaacgcgtggatcccgctgttcatgtttaaagtttacggctttaacctgaaagagatcgcgatgttcgcctggatgccgatgctgtttgctgacctcggttgtatcctcggtggttacctgccgccgctgttccagcgttggtttggtgtgaacctgatcgtttcccgtaagatggtcgtaacgctgggtgcagtgctgatgattggcccgggtatgatcggcctgttcaccaacccgtatgtcgcaattatgctgctgtgtatcggtggttttgcccaccaggcactgtctggcgcgctgattacgctctcttccgatgtgtttggtcgtaacgaagtggcaacggcaaacggtttaaccgggatgtccgcatggctggcaagtacgctgtttgcgctggttgtcggtgcactggctgacaccatcggcttcagcccgctgttcgcagttctggcagtgttcgacctgttaggtgcgctggttatctggaccgtgttgcagaacaaaccggcgattgaggtggcgcaggaaacacataacgatcccgcaccgcaacattaacgtttcgtgtaagttttagtttcccttcaaagccgccttctcaggcggctttttcatcactgcgagtagagctaaactcgcaaaagtggtataacaaatatagtctgccgtatcatgcctggagcgcatatggaaatcactgaaccacgccgtttgtatcaacaacttgccgctgacctgaaagagcgcatcgaacagggcgtctatctggtgggtgataaactgcctgcagaacgctttattgccgatgaaaagaacgtcagccgtacggtagttcgtgaagccatcatcatgctggaagttgaaggctatgtcgaagtgcgtaaaggtagtggtattcatgtggtttccaaccagccgcgccatcagcaggcggctgacaataatatggaattcgccaattacggtccgtttgagttgcttcaggctcgccagctcatcgaaagtaatattgccgaattcgcggcaactcaggtaacgaaacaggacatcatgaaactgatggccattcaggaacaggcgcgcggcgaacaatgcttccgtgattccgagtgggatttgcagttccacattcaggtcgctctggcgacgcagaactccgccctggcggctatcgtggaaaaaatgtggacccagcgtagtcataacccgtactggaaaaaactgcacgaacacattgattcccgtaccgtcgataactggtgtgatgaccacgatcaaatcctcaaggcgctgattcgcaaagatcctcatgctgctaagctggcaatgtggcagcatctggaaaacaccaagatcatgttatttaacgaaaccagcgacgacttcgagttcaatgccgaccgctatctattcgccgaaaacccggtggtgcatctcgatacagccaccagcggcagtaaatgaaattcctgtccgacaggcgctgcaatgcgcctgtttgtctcgtcggtaagcgaaaagtataaagtgtcagcctgtgtaaatcctctcgccaccctcccctgcattcagcaaaatcagactccacggacatgtaattttgataacgaacaacgttgacctttgttacaattagattcaatttgaatttatgtttttgaatgctttcttatctcacgatttaacagggaatagttcaggctgtgttgatgtatcaaacccgcagaacataccaaaacagcaataacattgcggtagtgcatcttttaaaaccagcgtggcgttaaccgattcaccaggaataatgaatggaacttttgacccaattgctgcaagccctgtgggcgcaggattttgaaaccctggccaatccaagcatgattggcatgttgtattttgtcttgtttgtaattttgttccttgaaaacggcttgcttccggcggcctttttaccgggcgacagtttactggtattggtcggcgtgttgattgcgaaaggcgcgatgggctatccgcaaacgattctgctgctgaccgttgccgccagcctcggctgctgggtcagctatattcaggggcgatggctgggcaatacccgcaccgtacaaaactggctatctcatttacccgcgcattatcatcaacgcgcacaccatctttttcataaacacggtttaagcgcgctgttaattggtcgctttattgcgtttgtcagaacactgctgccgacgattgccgggttaagtgggctgaataacgcgcgctttcagtttttcaactggatgagcggtctgctgtgggtattgatcctgacaactctgggttacatgctcggcaaaacgccggtatttttaaagtacgaggaccagctgatgagttgcctgatgctgctcccggtggtgctgctggtgtttggcctggcaggttctctggtcgtgttatggaaaaagaaatatggaaatcgggggtaagggatgcaaatacctcgcatgagccttcgccagctagcctggtccggcgctgttttacttctggtcggcacgctgttgctggcctggtccgcggttcgccagcaagagtctacgctggcgattcgtgccgttcatcaaggcacaacgatgccagacggttttagtatctggcatcaccttgacgctcatggcattcctttcaaaagtatcacccccaaaaacgacactctgttaattacatttgactccagcgaccagagcgccgccgcaaaagcggtcctcgacagaacattgccccatggctacatcattgcgcagcaggacaataacagtcaggctatgcagtggctgacccggttacgggataactctcatcgcttcggataacttcctgttatccgaaacatatcactcactttggtgatttcaccgtaactgtctatgattaatgaggcggtggttaacactaccgcttcgttgtctggacaatcgttcctttgtaataggtccgaatcacaatggaaggttcaagaatgaaataccgcatcgctttagctgtttctctctttgctcttagtgccggtagttatgccactaccctgtgtcaggaaaaggagcaaaatatccttaaggagatcagctatgccgaaaaacaccaaaaccagaatcgtattgacggtctgaataaagccctgagtgaagtccgggccaactgtagtgatagccagctgcgtgccgatcatcagaagaaaatcgcaaagcagaaagatgaggtggcggaacgccagcaagatttagccgaggcgaagcaaaaaggcgatgccgataagattgccaaacgcgaacggaaactggcagaagcgcaggaagagctgaaaaagctggaagcgcgcgactactaactcacaatagtcactacttactcacctggagaaaactatgagcaaagaacacactacggaacatctgcgtgctgagttgaaatccctttccgatacgctggaagaggtgcttagcagttctggcgagaagagcaaagaagagttgagtaagattcgtagcaaagcggagcaggcactgaaacagagccgttatcgcctgggtgaaaccggtgatgccattgccaaacaaacccgtgtcgcggcggcgcgtgccgatgagtatgtgcgcgaaaatccgtggacgggcgtgggcattggcgctgcaatcggtgtagtgctcggcgttctgctgagccgtcgttaattatggcggacactcatcacgcacaagggcccggtaaaagcgttctgggcatcgggcagcgaattgtttctatcatggttgaaatggtagagacacgtctgcggctggcggtggtggagctggaagaggaaaaagcgaatctctttcaacttttactgatgctgggcctgacgatgcttttcgctgcatttggtcttatgagcctgatggtgctaattatttgggcggttgacccgcaatatcgcctgaatgcgatgattgccaccaccgtggtgttgctgctactggcactgattggcggtatctggacgctacgtaaaagccgtaagtctacgttgctgcgccatacacgccatgagttagcaaacgatcggcagctgctcgaggaggagtcccgtgagcagtaaagtcgaacgtgaacgacgtaaggcgcaactgcttagccagatccagcaacaacggctggatctttccgccagtcgtcgtgaatggctggagacaacaggcgcttacgatcgtcgctggaatatgctgctaagtctgcgctcctgggcgctggttggcagtagcgtgatggcgatctggacgattcgccatcctaatatgctggtccgctgggccagacgcggttttggcgtatggagcgcctggcgtctggttaaaacgaccctcaagcagcaacagcttcgcggttaacttccctctggccggagccattccggccttatccctcaaattttttgaagatttttgacagttttccttgctaacaatcatcattcaccacgtttatgattctctccatcgacagcaacgacgctaataccgcgccattgcacaaaaaaacaatcagcagcctgagtggcgcagtggagagtatgatgaaaaaattagaagatgttggtgtactggtagcgcgcattttaatgccgattctgtttattaccgctggctggggaaaaattactggctacgcgggtacccaacaatatatggaagcaatgggcgtcccgggttttatgctgccactggtgattctgcttgagtttggtggtggtctggcaatcctgttcggtttcctgactcgcaccacagccctgtttactgcgggctttacgctgctgacggcatttttatttcacagcaactttgctgaaggcgtcaacagcctgatgttcatgaaaaacctgacaatttctggcggattcctgctgctggcaattaccggtccgggcgcgtatagcatcgaccgcctgctgaataaaaagtggtaagcacgcgctatacttaacgataaaaaacgaggaggaagctcctcgtttttgctattggaggagagaaaaatgggtcaactgattgacggcgtctggcatgacacctggtacgataccaaatctaccggcggtaaatttcaacgtagtgcttccgcatttcgtaactggctcactgccgatggcgctcctggccccactggcacaggcggttttatcgcagagaaagatcgttatcatctctatgttagtctcgcctgcccgtgggcgcaccgcacgctgatcatgcgcaaactcaaaggactggaaccgtttatttccgtttccgtagtgaacccgctgatgctggaaaacggttggacctttgatgacagttttccgggagcaaccggagacacgctctatcaaaatgaatttctgtatcagctttatctccacgccgatccacactacagcggacgagttactgttcccgtgctgtgggacaaaaagaaccacaccatcgtcagcaacgaaagtgcagaaatcatccgcatgttcaataccgcgtttgatgcgctgggcgcgaaagcgggtgattactaccctccagccctgcaaacaaaaattgacgaacttaacggctggatttatgacaccgttaacaacggcgtgtataaagctggttttgccaccagccaggaagcttacgacgaggcggtggcgaaagtgtttgaaagcctggcacgactggagcagattttaggccagcatcgttacctgaccggcaaccagctaaccgaagccgatattcgcctgtggactacgctggtgcgttttgatccggtgtatgtgacccacttcaagtgtgataagcaccgcatcagcgattacctgaatctgtacggttttctgcgcgatatctaccagatgccggggatcgccgaaacagtcaatttcgatcatatccgtaatcattacttccgcagccataagaccatcaaccctacggggattattagtattggtccgtggcaggatctcgatgaaccgcatggacgagatgttcgcttcggttaaaaaaaggcaccttacgaggtgcctctgataattagctaagtgcatgttgttcatgtcggatgtggcatgaacgccttatctgacatacaaaacattgtacattcaatagattgcataacccgcgcagaccagataagcgtagcgcatctggcgattttgcgcttgtcatcagtcttagcgcgccttcacggcactttattaattccttgaacgaatatttactgccatttcattcacgtctattcttaatttgctgctttaaaaacaagtgattgagcaaaattgaggcaaaaatggactggtatctgaaagtactaaaaaattatgtcggtttccggggtcgtgcgcggcgcaaagagtactggatgtttattctggtcaacatcatctttacgttcgtgctggggctgctggataaaatgttaggctggcaacgcgctggtggcgaaggcatcctgacgacaatctacggtattctggtgtttttaccgtggtgggcggttcagttccgccgcctgcacgacaccgaccgcagcgcgtggtgggcactgctattcttaatcccgtttatcggctggcttattatcatcgtctttaactgccaggcgggtacgccaggcgaaaaccgctttggaccagatccaaaactggaaccttaaaacaaatctgctcgccggatgtctgactcatccggcttttatcattatgttgatgaatgaataatttactaatgtttatttaaaatatttcaatgtcgttatataaattacctataaaaaataaccatgtatttatcttaaatatcaaaacctttataacatccgaaaaagaaagatacgaatagcatttacacaatacccggaatagactttcgtcacttttaattaaagggatgtttttatgcagtggtatttgtccgtattaaaaaattatgttggtttctctggtcgcgcacgtcgtaaagagtactggatgtttactctgattaacgccatcgtcggcgctattatcaatgtcattcaattgattttaggtctggagcttccatatctgtctatgctttatttgctggcaaccttccttcccgtccttgcgcttgctatccgtcgcttacacgataccgaccgtagtggtgcctgggccttgctcttttttgttccgtttattggctggctcgtgcttctggtttttttctgcacagaaggtacttctggcagcaatcgttacggaaacgatccgaagtttggtagtaattaatcttagaattggggcgatatttcgcccctttttattaacaataataaatattattttccgttaaaaagtttgggaatttcccgcagacaccaggatttcgcttcccccatactgtcacgacgccaggccataataatatcgatctcgctggtgctttccgggctgacgacacgcaaccgcccttccgcaatatctttttcgaccataggatacggcatcgtcgccacgccaagccccgccagtaatgcctgacgtttatcttcaatcgtgctcaccgttaagcgcggctgtttgtccagcagctgtacggtcaacaccgggcgctcacgagcggtatccgccaccgcaattccacgatatttcacacgcgtcacttcagataacggttccggctcctgatgaatcgggtgatcaggcgcggcaacgtagacgttcattaacgtatagagcttgcggctgttgatctcgctgctggaacgaaaatgcatatccggcgcgataacaatatccgcccgcccctgctccagccgttcccacgcccccgccagcacttctgtgatgattgccagttgggtattggcttttgccgccagtttgtcgattaacgggaaaaaggcaggtgtcggtaccagcgcttcggtcacaatggtgagatgcgtttcccaaccgcgcgcgagagcttccgcatcagtagtcagtttatctgcggcttccagcaaaacgcgccctcgctccaacaacatcctcccgacattggtgaatttggtacgatggccgctgcggtcaaacagcaccacatccagctcttcttccagtttttgcatggtgtagctaagtgcggaaggcacgcgtcccagctcatccgccgccgccgcaaaactgccccggcgatcgatcgcatccataacccgtagtgcttccagcgttaatgccctttctttggccatttcgttctcattcaggaaatttgaacataccgggcagaatatctggctaacaatgtagcgtccagccccttaccataaaaggaagtaaagagaggtcaagaattatgattactacccgaactgccaggcagtgtggacaagcagactacggatggttgcaggcccggtatactttttcctttggacactacttcgacccgaaattgttaggctatgcctccctgcgtgtgcttaaccaggaagtgctggccccaggtgccgcctttcagccgcgaacctatcccaaagtcgatattttaaatgtgattctggatggagaagcagagtatcgcgatagcgaaggcaatcatgttcaggccagcgccggagaggcgttgctgctctctacccagccgggtgtcagctatagcgaacacaatctcagcaaagacaaaccgttaacgcgaatgcagctttggctggacgcctgcccgcagcgagagaatccgctgattcaaaagctggcgcttaatatgggcaagcagcaattaatcgccagcccagagggtgcgatgggaagcctgcaattacgccagcaagtgtggctgcaccatatcgtgctcgacaaaggcgaaagtgcgaatttccagttgcatgggccacgcgcgtatttgcaaagcattcacgggaaatttcatgcgcttacgcatcatgaagagaaagcggcgctgacctgcggtgatggggcgtttattcgtgacgaggctaacattacgctggttgccgattccccactgcgcgctttgctgatagatttgcctgtctaattgtttttacagggagatgatgatgagtaaaaaattggccaaaaagcgccagccggtgaagcccgtggtggcgaaagaacctgctcgcaccgccaaaaattttggctatgaagagatgttgagcgagctggaagctatcgtcgcggatgctgaaacgcgtttagccgaggatgaagctaccgcgtaaagacaggttgccggatgcggcgaaaacgccttatccggcctacaaaatccaacaacattaacgaattaaacaacccgtaggccggacaagatgcgccagcatcgcatccggcacgatccccaaaacctggcgtttatctggccttgctcgccataatctcgataatctgccgatccgtttgctgcatgctatggcttgctaacgcacacaggttggcaatgctctgctcaacatcatgcgccacaatcccttcattgccggtcacggcggtatcatccagcgccattaacaccgctttccacgcagcgctagcactggtgctaaccttcatcgcgcagctgttgctcgcaccatcgcaaatcatgccgctgacatcgccgatcatactgctgatcgccatgctgatggtttcataacgcccatccaccagccatgccatcccggcggcggcccccattgctgcggtcgttgcggcacacagcgcagacaaacgcggtaactggttatggatgtaaattgcgctcaaatggctaagcatcagcgcacgcgccagccgttcatcatccgctccgaagtgttctgctaccaccaccacaggcattgttgcggtaatcccctggttaccgctgccggagttactcatagccggaagcgtagcgccgcccatacgcgcatcggatgccgcgctggtacgaatcacaatggaactagagagatctttcgccagcaaaccgcgctcgcactgtttttccagcgtcgcgccaatatgcagcccccacttaccgctcaaaccttcctggcttaacgcacaatttagcttcgcggaatcgagaataaagcggatcgccgcaaacgggacttcattgacgaacttcaggatctcagccagcgtcgttctggaaagcaccgtcagcggagactcttgctcgccctctgccacacacgcctgctgggtaaacaccacaccatcgtgcgtctcgatatgcacaatgttggtatgcccgccgacgatggtgacacacgcccacttctcaccgttccagactttggcgcgactgaagaggatttcatcgcaaggttcctggatcttaacggagactttccccgccgccagcagtgctttggcatcggcaattgcctgcgctgttgcgtctttcagcacttccagcccggcgttggcatttccacctaacgcccccagcgccgccgcaatcggcagccccaccattcccgtgccgggaacggtgacgcccagaccgttcttcatcagatttgggctaacccaggcttctacacgttcaaccggaccttccagttctgccgcagcaaccgccgccgccagcgccagactaatcggttcagtacatcccagcgccggttttacttcctcctgaacggcgaggatgtaacgctgccataacggatttaaagtgctatcaaacatattaaaaaccttaaaatttcaggtaaatcaagaaaatgccaggaacggagaaacacacagcaacaaaccagtgacgataatcaggtacagagacatccctttgtatttgtgcaatgctggtactttgtaaaccagccacgccgggatcaggcaccctaccatgccgaaaatcgggctacagatagaggtgaagctcaacaccggtgcgttcagtacgatggcgctccaggccagcaaaatggcgaaaatcatgatgccgcgctgaacgagattttcgttaatcttctcggcaggcatcttgcgacgcaggatgttcattacgatcccttgcgttgcttcgcgaaagcctaaatagacgccaaagaatgcagtcatgacagcaaagatattgagaatgacgctgaccactttcacccacgctgcgccgtcaccgctaataaactgtgcggcaatcgccagcgcggaaatattctgctcataggcttttaccgcttcgtcatgtcccatcgccagcgtgaagctcacggcgtagaaaaagacggtgacaaacaaaatgccaaacgcgatattcattgcccgcaatgctttatgccgcgccacttcaatacttttttcccggctgcgataagagatcaccatcggacttaacgtctggataaacagaatgctcgtcagggtaaacggcagcgtaataatggcgtttttcaccagcagccccagcggcggtaggctaccgacgttatacagatgccacattcccaccatgctcacgcccagcgccgcgaccaccagcagcttggtcagcaccatgccggtgctaattttgaataacaatttctcgccgcgactggagatcgccaccagaatgcaaatcagtaccagaccataaaagggactgtcactcagcaacccttccgtcacgccgaaggtatgcaggtaggaagcactatcgttggtgatggcggtggaatagacgaacatccaaatcaccagcattacgaaatagagcgcacctaacaggatgccccagtttttacctaaataaccgctaatgacgctcgggtaatctttacattctggactttctgccagcgtattaataaacaatcgctgaaacagatacattgccgggtaaccaatcacgctactgagcaaaaatacccacaatcccatcaaaccgacctgcaccgggagaaaaacaatccccgcgccaatcgccatcccgatactcataatcacccagccggtgtcagtactgtcgaatttgatcgcttctcgccactcgctctcactcattccagcacgacccgccggggtcgaagcgtctgcaatgacgcctttattcgatgcaatttccataatttctcgctcaatattttgtagggcttattatttttttccgagccgcatcaaggcgatatgcggtctacgtttttgcaggcgagttattagaataaagaaatgatacgcgcgaggtcagagaaaatcttcacaatcaagactttgaaataacggagatggataagaattttctactaaattaatcgcaggagaatattcattctctatttgcggcagatcacaaaaaaaaggtgcacatttgtgcacccaaggatgaaagctgacagcaatgtcagccgcagaccactttaatggccagtcctccgcgacttgtttcgcggtatttatcgttcatatctttgccggtttcatacatcgtctcgatcactttatcgagactaacacgcggtgcgctggtgcggcgcatcgccatccgcgcggcgtttactgctttcacggcattaatggcattacgttcaatgcacgggatttgtacctgtccggcaaccggatcgcaggtcagcccaaggttatgctccatcgcgatttccgccgcattgcatacctgcgccggactgccgcccagtagttcagttaaccctgccgccgccatactacaggccacgccaatctccccctgacagccgacttccgcgccagagatggaggcgttcattttatacagcgcgccaatagcccccgcggccagaaaatagcgggcaatactccgctcgtttaccggacgacggaacttatcgtaataagccagtactgccggaataatgccgcacgcaccgttagtcggtgccgttaccacgcgcccgccagctgcgttttcttcactaaccgccagcgcgtacatgttgatccagtcgatgacattcatcggatcgttagagatgttatcgctggaaaccagctgacgacgcagcgctacggcacggcgcggcacattgagcggaccaggcagcacgccttcagtgttcatcccacgttcaataccgtcatgcatcacttgccagatacgggcaaaaccggcgtcaatttccgctttgctgcgcagcgctagctcgttgtgcatcatcagaccagatatagacaggccgttgtaatcacacattttcagcagttcacctgcactgtggaaatcgtaaggtacggacgtttcgacatcgtggctcaggccgaagtgttcttcttcgacaataaacccgccgccgacagagtaataggttttacttaatagctcttcctgtcccttccaggcagtgatccgcattccgttctcatggcgaggcaacatttcgggatggaagataatgttctttgctacaggaaaatcaacaatatgcgcaccagatgccactggcagccgcccgctgcgcgttactaactctataaatgcagggatctcatcaatgacaacatcctgcggactgtttcctgccagtcccatgatgatggcgacatccgtggcatggcctttgcccgtcagactcaagctcccgtacagatcgaccacaatatggctcgtcgcggttaataagccgctactttccagccgatcaataaaactttttccggcattcattggccccacggtatggctactggagggaccaatcccaattttgaaaatatcgaatgcactaatcatatccacaccctcggattgccgttcagtgaagtggagcggaacgaccttacgaccgtcccgctcacgaggctttacgcactacgtactgcgatggcttcaatttccagcttcacatctttcggcaaacgcgcgacctgcacacagctccgggtcggataggtcgcctgatgctcatcgaagaactgcttatagacttcgttgatggtggcaaaatcattcagatcggtgataaacacggtcatcttgatgatatcgcccacgctcagcccggcagcaaccacgatcgctttgacgttttcgaggcttaaacgcgcctgatcttgcacatcagccgggatctcaccggtctgtgggcaaaccggtatttgcccggaggtgaagaccatgctgcctaaatcaacgccctgaacataagggccgattgcgcctggggcacgttgcgtttcgataatctttttcatacatcctccggcgtcagagcgcctgggtaaaggtacgactaataacatcctgttgctgttcacgggtcagtgcgttgaagcgcacggcgtagccagagacacggattgtcaggttaggatatttttccgggtgctcgatggcatccagcagcatttcccgattcattacgttgacgttgaggtgttgaccgccttcgacatccgcttcgtggtggaaatacccatccagcaggccgacaaggttggttttacgtactggatcttctttgcccagcgccgcaggaacgatactgaaggtgtagctgatcccatctttggcgtaggtgaacggcagtttcgccacgctcgtcaaactggccacggcacctttgcggtcacgaccatgcatcgggttagcgcccggcgcgaacggtgttccggcgcgacgaccgtccggcgtattaccggttttctggccgtacaccacgttagaagtgatagtcagaatgctctgggtagggacggcgttgcgataggttggcagcgctttaattttcttcataaagcgttcaaccaggtcgcaggcaatgctgtctacgcgctcgtcgttgttgccgtactgcggatattcaccgtcgatttcaaagtccaccgccaggccgttttcgtcacggattggtttcacgcgggcatatttgatggcagacagggagtccgtcgccacgctcaggcccgcgatgccgcatgccatagtgcgatagacatcacgatcgtgcagcgccatcaggctagcttcgtagctgtacttgtcgtgcatgtagtgaatgatattcagcgcgctgatgtactgcaccgccagccagtccatgaagtgatcgaggctgtccatcactttgtcgtaatccagcacgtcgtccatcagcggtgctgttttcggcccgacctgaatcttcagcttctcgtccaccccgccgttaattgcgtagagcagcgttttcgccaggttagcgcgtgcaccaaagaactgcatttgcttaccaatcaccattgggctgacgcagcaggcaatcgcgtaatcgtcgctgttgaagtcagtacgcatcagatcgtcattttcatactgcaaggaagaggtgacgatgctcacctgcgcggcatattttttgaaggcaatcggtaattcttcgctccaaagaatggtcaggttaggttccggtgccggccccatagtgtgcagggtgtgcaaatagcggaaggagtttttggtcaccagcgtacgaccgtccagccccatcccgccgatcacttccgtcgcccagattgggtcgccggagaacaggctatcaaattccggtgtacgcaggaagcgtaccatacggatcttcatgatgaagtgatcgatcagttcctgtgcctgctgctcattgagtacgccagctttaaagtcgcgctcaatgtagatatcgaggaagcttgccgtgcggcccaggctcatcgcgccgccattttggcttttcactgccgccagataagcgaagtagagccactgcaccgcttcctgcgcattctgcgccgggcgagagatatcaaagccatatttcgccgccatttcctgaatctgcaacagcgcatgacgatgctctgccagctcctcacgcagacggatggtggcttccagatcctcgcctttttccagacgagactggagatcggcaaattgcagttcgcgttcacgtaccagataactgatgccatacagcgctacgcggcgatagtcaccgataatgcgcccacggccatagccatctggtaaaccggtcagcacgccagatttacggcagcgcagcatatccggactgtaaacatcaaatacgccctggttatgggttttacgcagatcggtaaacagatattcaaattcactgtccatttctcggccataggcgtggaaactacttttaatcatattaatgccaccgaacgggtgtagcgcacgtttcaacggcgcatccgtttgcaggccaacaattttttccagcggctggttaatatatcccgcatcatgagcggtaattgtggtggcaatattggtatcgaaatcaaccggcgcgtgggttgcattttcgatacggatgccttccattactttttcccacaattccgtggtggcaggcgtcgcttcggcgaggaaagattcatcgccttcatacggtgtatagttatgttgaataaaatcgcggacattaatttcgtttttccagtccgtacctttaaagccaagccatgcgtcggcgtacagcttatcgctggtatcaatatctaccttcatgaaaaataatctctctacaatacttcaactaaattatgcaaattctgcgggcgcgttaactttgcctaaatgaatggcatccaaagcaatcattttttcttcgttagtcggaataacggcacaaatgacacgcgcattttcactggaaacaattcgctcaccacaggagttagagcgattattcatttctgtatcaatctctaagcctaatacagccaaatgttccatgaccagacgacgaattaagctactattctctcctattccgccggtgaatataattccatccaggcgacgtaaactagctgcgtgtccggcaatatgacgggcaattcggtgaacaaaggttttaattgccagttgcgcgcgttcgtgaccttcatgccaggctttttccagaacacgtaaatcgctagaaagaccggaaatacctaataatccgctctctttattcactacgcgttccaggtcacccaggctctggttggtttggctggcgacccaggacatcgcaccaaagtcgacatcgccactgcgggtacccatcatcaagccttccagcggcgtcattcccatactggtatcaacactctgaccgttgcgaaccgcgcagatactcgcgccattgccaagatgcgccacaaccaggccggagtcatcttccgccagattcagcaggctatgtgcgcgctgggaaacatagcggtggctcgtgccgtggaaaccataacggcgtacacctaactcttcataatatttccacggcaggccgtataaataagcttccggagccatcgtctggtggaaactggtatcaaataccgccacctgagttacgcccggaaataattgctgcgcgctttcaataccacttaaattggcgtaattatgcaggggtgccagtggagaaacgcgacggatattatcaatgacttcatcggtaataatggcggactcggtaaaaatactgccgccgtgagcgatgcggtggccaattaaggccacactgtcatttaaattccgtttttccagttcaaatgcaattgccttcaatgcaccttcgtagctgtggtgagccagcggtgctggctctcccccatttacggataagaatgcattttcgctgttaataccgtcggcaataccactcattaatacttcacagtcgctggcatcgagcacggaaaacttaatgctagagctaccacagttaataaccaaaacaaccggaaattcattcatctcttttctcatcctgagttacggattaaaacagtttgtatacgatgttcaggatggtcagcagaccaatcacggtaacaaacacgttatccagacgaccacggtatttcgccagagacggcgctttacggatggcatacatcggcaacaggcacagcagggatgcgataatcggtgcgcccatggcttcaatcaggtcaaggatgttcgggttggcgtaggcaacaacccaggtggagcccatgatgaagatcatgctgatagtgttcagtttacccaggctcactttagttttgtcgcctttataaccaaacttcaggaccaggccattcagaccttccagcgttcccagatagtgaccgaagaaagatttgaagatagccacgagtgcgatgatggaagccgcatattccagtgtaatcgcgaacgttgttttggtaccggtcatggacgcaaagtggttagccagataagaaagcactggaatattctgcgctttggcttccgccatgttggccggagacagagtaaacaggcagctaaaggcaaagaacatcaccactgcaaccatcagcatgctggcacgagaaatgatttgggaacatttacgttcggtgaagtcgcgaccgaagtctttctcatactcttcacgcttagaaaccacgaaggaagagacgattgggctgaagttaaaggagaaaaccatgatggaaatccccagccagacagtgatcaggataccgtcatgaccggttaagctcaggctaccgaggtcaacctggtcgataactgcagagttccagtaagggatcaggctcaaagaaatcagcaccaggctggcgataaacggccataccaggtagctcatcactttaaccatcagatccttaccaaaccagatgacgaaagccatcagcagcaacaggaacagcgccacaaagccgcgattcagcggtgcaaagccgagctggttttcccagaacgtcataaaggtattggtaatagtaacgccataaatccacagcagtgggcaaatcgcgaagaagtacaggaacgtgataaccacgccgccagttttaccaaaatgctcttccaccgtttccgtaatgttgccggaagggttagagccagaaagacacagacgcgccagcgcccggtggcaataaaacgcgatggggtatgccaataccaacatcagaagaatcgggatcagtccgccaaaacctgcgcggatagggaagaacagcaccccggcgccgattgccgtaccaaacaagcctaacgtccatgtggtatcacttttacgccaggagctttgttttgtctggctggatacaatgctatcactagtactcatatcctatcctcaacgaattaattaagcgtcaacgaaaccggtgatttgagagacgcgagaaagatcgatattgccgccggaaataatactgacggtttttctgttttgaatatattggtctaatttaccgcttaataatgcagcacatgccagagcgcctgcgccttcggtgacgactttattgcgctgaattaaggcaatcatactgtttctgatttcgtcttcgctgaccagcacgatgtcatcgactaattcacgaacgatttcgtaagttaaattacccgggcgggagacatcacaaccatccgccagggtgccggtagttcggtgcgtggttatttctccggagtggaaagaagccgccatgccgtgaacgttttcagactgtacgccaataacacgaatggtcgggttaatagatttaattgccaccgcaataccagcaattaaaccgccaccaccaattggcacaatcacgttatcgacatcatagagatcttccataatttccagaccaatcgttccctggccagcaatcactttcggatcatcgtaaggtgggataaaaatacggccttccatttcgacaatttcgctcactttagcgatagtgtcgttgaagttatcaccatgcagaacgacttctgcggagtagtcgcacgttgccgctactttggattttggcgcaccttttggcatcaccactttaccgtcgatacccagcatcgcgcaggagagggaaaccccttgcgcatggttgcccgcagaacaggccaccacgcctttgcgtttttccgcatcggtcagactacttaatttattaaatgcgccacgaattttaaaactacccgtacgctgcatattttcaaacttcaggaatatttcacctttgcaacgttcactaaaatagttggagcgaggcatgcctgttttataaattcgcccagccagtcgttgtttcgcttcaataatgtcatcaatagcaaccggcagatcgtatgtaatatgcattataaaacctcttcgcctgaattaaatatgtaggtaaccgtaaccgacacctgcaagacagacaggtggattatttatgtttaaataaaaacaaataattaaccaacttctattaattgccttcgtctacacccattataagaactatactctttggctaattccaccaaaacgcttgctgcttttttaatacgataatttttgctccataccgcggcatattgtgccacaggtaatgtttcttcaaccggaatagtaataaattgattagaaccaaaaggactcgtcatatcacaaggaattacagttaagaaatcagcattgagaacaagattataaattgtcacgacactgtcggttttaacgatgttttcaatactgatgccatttctttgtaacgtagtaagcagttcgctgtagtaccccatattagtttgtggcaacacccactgttcgttcttcaagctctccagcgtggtggtgccggtgcatgttcgggacttactggctaccagcacaaactcggactcgaacagcggctcaacatgtaaatcctgaagcttcatttctgcacttaacgtaccaatcgcaaaatccagtcgaccgtcgcggattgccggtaagaagctagacagttgcgcttcatacatagaaacctgcgctttcgggaacacctctttgaacttgttgatcatcccactcataaaagtaaaaccaatcaaactaggaaaaccaaaactgacttccaccaccgcctcagaagacataccgcttatctcattaaccatatttttcatttcacgggtaatggattcggaacgggagagtaacaattgaccggcaggtgttaatgttacaccggtatttttccgcaccactaattccacaccaaaataatcttcaatatcgttaatgattttactgacggccggttgagttaaccctaattcttttgcagcgctgccgatagaaccacttctaatgacttcctgaaagactaccaggtgctgcgttttcggaagaagaatagtgctcataacgacctacgttaattacctcattgacggcatgaagtgtatcaaaatgaaatgaacaggatatgtgcgaccactcacaaattaactttcaatactttccagagtatcgttattacaattaaatacctttaaatatcaacaagttaaagtataaaaatcagcataaaccctgatttttgtcaaaaaaaatgacggggataaccatattttatggcgataacatcattcgttatgtggttaatacaaaaaaggggctgagaccatatttcaagcaattaccggataattaccaggcaaaatttgagttaaatttaatgagcaagttcagtaattttattataaataaaccatttagtgtgataaataatgcggcatgtcacatttttagtcgctatttgttggagaacaaacatttattttatcaatattttaaaattagcaatacatgtattgatcatctcgaacaattgattaacgtcaactttttctcttctgacaggacgagtttttgtgaatgcaatcgttttccataaattcttctcccctcataggcgacgaatagcattttgtgttgaggattacaaaacgaataattgctgatcgccgcgataaggtcagacaaagacaacaagggaaattttcacagagcttttgatcggcgtaggccacagaatgttgcttcgtttactgtaacgccgggtaaatgagcgttttttgatagtgcgaaagaaccctgcgaggaaaataagcatctattattgtttgtcatgatgacaaggcaggcatcaatgaaaggcttcccaattgcgcatatttttcaccctagtatcccgccaatgcacgcagtggttaacaatcacaatagaaatattgattattggacggtaaaaagaaagtttgcagaaattgtctccaccaatgacgttaataaaatttacagtataagtaatgaactgcggagagtattatctgcaataactgcattgaatttctatcatggcgatgttccttctgtcatgatccgaatccaaccggaaaatatgagtccattcattatagatatttctacaggagaacatgatgattatatcatacaaacattagatgtaggcacttttgcaccttttggtgaacaatgtacttgcagtgccgtcaataaaaaagagctggaatgtattaaggagacgatttctaagtattgtgcaaaattcacccgaaaagaagccatcttaaccccccttgtgcactttaataaaaccagcattactagtgattgttggcaaattctcttttttagtcccgatcattttaataatgatttttattgattatttataaaggataaaataatgttccctgttagtagtattggtaatgatattagtagtgatttagtccgtcgaaaaatgaatgaccttcctgaaagcccaacaggaaataacctcgaagcactagcaccaggtatagaaaaactaaaacagacctctattgaaatggtcactttacttaacacgttacaacctggtggaaaatgcattatcactggtgattttcaaaaagaattagcgtacttacaaaatgtaattctttataatgtcagctctcttcgtctggattttttaggttataacgcccaaattattcaacgaagcgacaatacttgtgaacttaccattaatgaaccgttaaaaaaccaggaaatatccacaggtaatatcaatattaattgcccattaaaagatatttacaatgaaatcaggaggttaaacgtaatttttagttgtgggactggagatatcgttgatctatcctctctggacttacgtaatgtcgatttagattattatgatttcacagataaacatatggctaatactattttaaatccttttaaattgaatagtacaaattttactaatgccaacatgtttcaggttaattttgttagtagtacacaaaacgccacaatctcctgggattatttactaaaaataacgcctgttttaataagcattagcgatatgtattctgaagaaaaaatcaagtttgtcgaaagttgtttaaatgagcctggagacattaccgaagaacaattaaaaattatgagatttgcaattataaaatctataccaagggcaactcttacagataaattagaaaatgaattaacaaaagaaatatataaaagcagtagcaaaatcatcaattgcttgaacagaattaaattaacagagatgaaagaattcagtagtgaaaaaatatatgattacatcgatataatcattgaagattatgaaaataccaaagaaaatgcttatctggtcgtcccccaaattaattatactatggatttaaacatagaagactctagcagtgaagagttacttagtgataataccctcgagaaagacgaaaattctccggacaatggctttgaggtcggggaatataacacatatgaagcatataacagtgagaagcaatattttaccagagaggactatacgtatgattacgaccttttaaatgcaatataaacttaataacttcttacaaagtctattattaataccgtagatatttattcatcttaccctgtgcaccaaaagcaaaaactcactgacgcgggtttgaaactgatggcaaccgcaaaaatgcctgatgcgctacgcttatcaggcctacgccatctctgcaatatattgaatttgcgtgcttttgtaggcaggataaggcgttcacgccgcatccggcatgaataaagcgcactcaacaatctgaaacccgccggaacggtttattacgtacatcaggtaaaactgaccgataagccgctttcttttgggtatagtgtcgtggacagtcattcatctttctgcccctccaaaagtaaaaacccgccgaagcgggtttttacgtaaaacaggtgaaactgaccgataagccgctttcttttgggtatagtgtcgtggacagtcattcatctttctgcccctccaaaagcaaaaacccgccgaagcgggtttttacgtaaaccaggtgaaactgaccgataagccgctttcttttgggtatagcgtcgtggacagtcattcatctttctgcccctccaaaagcaaaaacccgccgaagcgggtttttacgtaaatcaggtgaaactgaccgataagccgggttctgtcgtggacagtcattcatctaggccagcaatcgctcactggctcaagcagcctacccgggttcagtacgggccgtaccttatgaacccctatttggccttgctccgggtggagtttaccgtgccacggactgttaccagccgcgcggtgcgctcttaccgcaccctttcacccttacctgatcccgcttgcgcgggccatcggcggtttgctctctgttgcactggtcgtgggtttcccccccaggcgttacctggcaccctgccctatggagcccggactttcctcccctccgcccgtctcccccgaagaggacgacgacgaagcggcgactgtctggtcagcttcggcgcgcagtatagagggtttgcgcgcccttgtcaccccgcgttgcgcattccaatcgccagtgtcgcggcgatattacgactagcacggcagatattgtcataagccccgcggaatgcttcgtccaacgtacctatgctggtcaatacgctgaagaccgcatcaatgccatgctgatgtacaacgccaacatcatcggtcaggctacccgcaatgccaatcaccggtttatggtacttcttcgccacgtttgcgacaccaatcggtaccttcccgtgaatactctggctgtcaatacgcccttcaccggtgatcaccagcgtacaatcgtgaatatgttcctccagattcagcgccgtagtgacgatttcaataccacttttcagttccgcaccaagaaacgccattagcgccgcgcccataccacccgcagctcctgcaccggggacatctttcacatcaacatgcagcgcttttttaatgacctcggcatagtgagagaggttattgtccagctcaacaatcatcgcttcactggctcccttttgtgggccaaagatgcggcttgcgccgttatcgcccaccagcggattggtgacatcacaagcgacgcgaatgacgcaatcttttaagcgcggatcgaggccggaaatatcaatatcattcagagtattaagactaccgccgccaaaaccaatttcattgccgttggcgtcgcataatttcgcccccagcgcctgtaccatgcctgcgccgccatcatttgtagcgctgccgccaatgccgataataatgtttgtcgcaccgctctccagcgcctgcaggattaactcgcctgtgccgcgactagtggtcacgagtggatcgcgtttttccgcaggtaccagctccagcccactggccgccgccatttcaataaacgcggttttgccatcgccggagatcccccaactggcattcactttctcgcccagcggccctgtaacccaggcgtgacgttcagccccctgggtggctgcaatcatcgcttccaccgttccttcgccaccgtcggcaaccggaacagaaacgtactgtgcatcaggaaaaatttcccgaaatcctttttctatcgcctgcgcaacctcgctggcagataaactttctttataagagtctggggcgattacgattttcatacctatgcctgttaccacatgacgccggagggcgtttctcttattcggcctggattccaggcccggattgcaatacgccatccgggcacgacgtcattaacgagtaacttcgactttcgccagtttttcgtagtagcacgccagggcgctatgatccgccgttcctaaaccatctgctcgcagtgcctgcatcatctccataaccgcagctgtgagcggcagttgtgcgccgacgccgtgagaagtatccagcgcattcgccagatccttaatatgcagatcaatacggaagcccggcttgaagttgcggtccatcaccatcggcgctttggcatccagcacggtactgcccgccagtccaccgcgaattgcctgataaaccaggtccgggttaacgcccgctttagttgccagcgttaacgcttcactcatcgcggcaatattcagcgccacaatgacctgatttgccagtttggtgacgttacctgcaccgatttccccggtatgcaccacggaacccgccatcgctttcatcaaatcatagtatttgtcgaaaatagccttgtcgccgcccaccatcacactcagcgtaccgtcgatggctttcggttcaccgccgctcaccggagcatccagcatatcaatgcctttcgctttcagcgcttcgctgatttcacggcttgccagcggtgcgatagaactcatatcgatcaataccgtacctggcttcgcgccttcaataatgccattctcacccagcgccacctctttcacatgaggggagtttggcagcatggttatgatgacgtcgcactgttcagcgatcgctttagccgtagacgctgtttctgcacctgcagcaatcacgtcagcaatagcttctgggttacggtcagcaaccaccaggctgtaacctgctttcagaaggtttttactcattggtttacccataatccccaggccaataaaaccaactttcatagtcatatcaatcatctctcttgttgcggtggtggttattttttaaaggtatcagccagtttctgagtggcagagcggaagacgccgagatcgctgccgacagccacaaacgtcgcgccccattccagataacgacgcgcatcggcttcgaccggcgcgaggataccgctgggtttgccgtgcgcgctggcacggttaaaaatgtgctgaattgctttttgtacatccgggtgacttgcattgccgagatggcctaatgccgcggccagatcgctggggccgacgaagatgccgtctacgccttcggtagcggcaatggcatcgacgttatctacgccctgctgactttctatctggaccagaatagtgatgttcttgttgctctgagcgaaataatccgccacggtgccaaacatattggcgcggtgagaaacggagacgccgcgaatgccttccggtgggtaacgggtacttgccaccgccagctctgcttcctcttttgtttctacaaaaggaatcaggaagttatagaaaccgatatccagaagacgcttaataattaccggctcgttggtcggcactcgcactactggcgcgctggcgctgcctttcaaggccattaactgcggaataaacgtggagatatcgtttggcgcatgttcgccatccagcaccagccagtcaaacccagccaaaccaagaacttcagtgctaatcgggttagagagtgcactccagcaaccaatttgtacctgtttcgcagccagtgcggctttgaatttattcgggaaaacatcgttattcatcgcttatacctttgcttatttctgcaattccatacgtttaatgtcgccaactacgaagaggtagcagaccatcgccatcagcgcactacatcccacgaaaaccagtgctgcattgaaggagtgcagttcacttaccaggtagccaatcaccagtggagtgacaatggaggcaacattgccaaagacgttaaagacgccgccgcagaggccaacaatctctttcggcgcggtgtcagaaatcaccggccagcccagcgcaccaaatcctttgccaaagaaagccagcgccatcagcatgaccaccagcgtggtgttgttggtgtagttacataagatgatggtggaagccagcaacattcccagcacaatcggtagcttacgtgccagggtcagggataaaccgcgtttgatcagataatcgctgaagacacctcccagcacgccgcccgcaaaaccacacagtgctggaatgctggcgaccagacccactttcagaatgctcatgcctttttcctgcaccagataaatcgggaaccaggtgaggaagaaccaggtgatggtgttgataaaatattgtccgaaaaatacgcccagcatcatgcggttagagagcaattgcttgatgtaatgcagtttgggtccgcttgctgccgcactgcccggctttttgtggtccatatcgaccaccgcgccattttcagagataaacttcagctcttccgcagacatacgtgggtgatctgtcgggttatgaatcaacttgatccacagcgccgtcagcacaaaaccaatcacccccataacggtaaagacgtgctcccagccccaggcgaaagtcagccagccaagcagcgggctaaagagcgccaggctgaaatattgcgcgctgttaaagatggcggaggcagtaccacgttctttcgtcgggaaccaggcggcgacaattcgggcgttcgccgggaaacttggcgcttcgctgaagccgagcataaagcgcataaagaacatggagatccctgcccaggccagcgggaacatatcaacaaagccttgcaggaaggtgaataggctccagaaaaagaggctgtaggtgtaaacttttttgctgccaaacttatcaagcagccagccgccggggatttgcatcagcaagtaggcccagccaaaagcggagaagatgtaacccatgctaaccgcacttaactgcaactcttttgccacttcggtaccagcaatagacagcgttgcacgatcggcgtagttaacggcggtaacaataaaaataatcagtaatattaaatagcgggtatgcacgcctttctttttttcgtcaacggtgtccagaatcattttatttacctcgggtacttatgctgatttttattattatggggaaggtgttatttatgagtttcatttatgccgtaacgacaatgaactcgggaattagtataagcagcgcgagaataataatcattgtgcaaatgctaatttaattaatactatttaaatattattttgagcatatgcacataaggttgcgcgctaaagcacagatttgcgctttaccttaccgggcggcactgcaatccctgaaatgattgacattgatcacatttctgcgtttaaactcctgacattcttatttcacccaatgaagtcatttatttttaaatgagaccaggtcctcattttaataacccctggctggagaatattgcacaatggccaacatcgaaatcagacaagaaacgccaactgcgttttatataaaagttcacgacacagataatgtggcaattattgttaatgataatggcctgaaagcaggaacgcgttttccggatgggctggaattaattgaacatattccccaggggcataaagtcgcattgctggacattccggctaatggtgaaattattcgttatggcgaagtgattggttacgccgtgcgtgcaatcccacgcggaagctggatcgacgaaagcatggttgtactaccggaagcgccgccgttacacacgctgccactggcaaccaaagtcccggaacccttaccgccgctggaaggatacacctttgagggctatcgcaatgccgatggcagcgtgggcaccaaaaacctgctcggtatcaccaccagcgtccactgtgtggcaggcgtggtggactatgtagtaaaaatcattgaacgcgatctgctaccgaaatacccgaacgtcgatggcgtggtggggctgaatcatttgtacggttgtggcgtggcgattaacgcaccggcggcagttgtacctatccgtaccattcacaatattagcctgaatcctaactttggcggcgaagtaatggtgattggcctgggttgtgaaaagttgcagcctgagcgcctgctgactggaacggatgatgtgcaagctattccagtagaaagcgccagcattgtcagtttgcaggatgaaaagcatgtcggttttcagtccatggtcgaggatattttgcagatcgccgaacgccatctacaaaaactgaatcaacggcagcgagaaacctgcccggctagtgaactggtcgttggtatgcagtgcggtggcagcgatgcgttttctggtgtaacggcaaacccggcggttggctatgcgtctgatctactggtgcgctgcggcgcaacggtgatgtttagtgaagtaacggaagtgcgtgacgcgatccatctgctgacaccacgcgcagtgaacgaagaggtcggcaaacggctgctggaggagatggagtggtacgataactatctcaatatgggaaaaaccgaccgcagcgccaaccctagcccgggcaacaagaaaggcggtctggcaaacgtggtagagaaggcactcggctccattgctaaaagcggtaaaagcgcaattgttgaagtgctgagccccggtcaacgcccgactaaacgcggattaatttacgccgcgacgccagccagcgattttgtctgtggcacgcaacaggtggctagcggtatcacagtgcaagtgtttacgaccggtcgtggtacgccgtacggcctgatggcggtacccgtcattaaaatggcaacccgcaccgagctggcgaaccgctggtttgatttaatggatattaatgcgggcaccatcgctaccggcgaagaaactattgaagaggtgggctggaagttgttccactttattctcgacgtcgccagcgggaagaagaaaaccttcagcgatcaatgggggctgcataaccagctggcggtgtttaacccggcaccggtgacctgatttcttttggaacgtccctcgcaaaacatggccttagtgccatgtttttattgtttaaagcccccacgtccattaataatgcatttgcattaccttagttcaagcttataatttgagcagaaaacaggctgtaaaaggacagtgaatcatgcccgctaatgctcgctctcacgctgtactgaccactgaaagtaaggtcacgatacgcggacaaacaactatccccgcgccagtgcgtgaggccttaaaactgaagccaggccaggacagcattcattacgaaattctgcctggtgggcaagtatttatgtgccgactgggagatgaacaggaggatcatactatgaatgcatttttgcgttttctggatgcagatatccagaacaacccgcaaaaaactcgtccattcaacattcaacaaggaaagaaacttgtcgctggcatggacgtcaacattgatgatgagattggcgacgacgaataatggattttccacaaagggttaatggttgggcgctatatgctcatccctgttttcaggaaacctacgacgctttagttgccgaagtcgagacattaaagggaaaagatcctgaaaattatcagagaaaagccgccacaaagttattggcggtagtccataaagtgattgaggagcatatcacggtcaatccaagtagtccggcattccgtcatggcaagagcttaggctctgggaaaaataaagactggagtcgggtaaaatttggtgctggtcgttatcgtctcttctttcgttatagtgaaaaagagaaagtcatcattctgggatggatgaacgatgaaaacactctgcgcacctacggtaaaaaaacagatgcctataccgtattcagcaaaatgttaaaaagaggacatcctcctgccgactgggaaaccctcacccgagaaacagaagaaacccattgatggtgttcacaatgcccgccgaacgcattcgtgttgaccagcgggcatcctttctcactccccgaccagaatcacttcaaccccagcctttcgcagtccttccaggctatccgcaggaatgccttcatcaacaatgatcatgtcgatacgttgagtatcaatgatcttatgtaaactggaacgattgaacttactggaatcggtgaccacgatgatccgttccgcaacttcgcacatccgacggtttaaacgagcttcatcttcattatgtgtgctgacgccgcgctccagatcgatcgcatctacaccaagaaacagcatatcgaagtggtaattttgcaggctttgctcagcctgatcgccgtaaaaagattggctctgacggcgcaaatgcccgccggtcatcagcagctcaacgccttccgcttccagcaacgcattagccacgttcataccgttggtcatcgcaattacgtcagtgtgcttgcgcatcagacgagcaatctcaaaagtggtggtcccggaatcgaggataacccgatgacctggctgaatcaactcaacggcagctttcgcaacgctgcgtttcatcgcggtgttcagtgcgcttttatcttccacacttggctcgacactcggcgtcgtgctatcgcagatcaacgcgccaccataggcacgcacagcgatcccctgcttttccagaaacgccagatcgttgcggatcgtcacagtagatacgccatacaatgcgctcagatcgttaacctgcacactcccttgctgtcgcagacgctgaatgatctgttctcgtcgctcgctggtgccagtcactcgcttctcaccactagcgtcggtattactcatagtaagtcctttcgtaaaactttcgtttcatttcgttttgcctattaacgcctttctattaagcaaatgcaagcccaccttgcccattgacgcaagctactctcgtttcagtgactttcattatgtttcttttgtgaatcagatcagaaaaccattatctttcgttttatttttatctcaccatgacgcagtatcaactgaaacaaaacgaaagattaatatcgcagtaatctgaactggagaggaaagtgaaacatctgacagaaatggtgagacagcacaaagcgggcaaaacaaatggaatttatgccgtttgttccgcacatccgctggtgctggaagctgcaatccgctacgccagtgcaaaccaaacgccgttactgattgaagcaacctccaatcaggtagaccagttcggcggttataccggaatgacgcccgccgattttcgcggctttgtttgtcagctcgccgacagcttgaatttcccgcaggatgcgttgattctgggtggtgaccatctggggccaaaccgctggcaaaacctgccggccgctcaggcaatggccaatgccgatgatttgattaaaagctacgttgcggcaggattcaaaaaaatccaccttgattgcagcatgtcctgtcaggacgatccgattcccttaactgatgacatcgtggctgaacgcgccgcccgtctggcgaaagtggcggaagaaacctgtcttgaacactttggcgaagccgatctggagtatgtcattggtaccgaagtgccggtacctggcggcgcgcatgaaaccttaagcgagctggcggtcaccacgccggatgccgcccgcgccacgctggaagcccatcgtcacgcctttgaaaagcaaggtttgaatgccatctggccacgcatcattgccctggtggttcaacccggcgtcgaattcgatcacaccaacgttattgattatcagcccgccaaagcgagcgccttaagccagatggtcgaaaactacgaaacgctgattttcgaagcgcactctaccgattatcaaacgccgcaaagcctgcgccagctggtgattgaccactttgccattctgaaagttggcccagcgctgaccttcgccctgcgtgaagctctgttctctctggcggcgattgaagaagaactggtgccagcgaaagcctgttctggtctgcgtcaggtgctggaagacgtgatgctcgaccgcccggaatactggcaaagccactaccacggtgacggcaacgcgcgtcgtctggcgcgtggttatagctacagcgatcgcgtgcgctattactggccggacagccagattgatgacgctttcgctcatctggtacgtaatctggcggatagtccaattccgctgccgctgatcagccagtatctgccgctgcagtacgtgaaagttcgctccggcgagctgcagccaacgccacgggaactcattatcaaccatattcaggacatcctggcgcagtaccacacagcctgtgaaggccaataagcaaaacaaagaggaacacgctatgccaaatattgttttaagccggattgatgaacgcttgattcacggtcaggtcggcgttcaatgggtcggatttgcgggggcaaatctggtgctggtagccaacgatgaggttgccgaagatccggtacaacaaaacctgatggaaatggtactggcagaagggatcgccgtacgtttctggacgctgcaaaaagttatcgacaacattcatcgcgccgccgatcgacagaaaatcctgctggtttgtaaaacacccgccgatttcctgacgctggtgaaaggtggcgttccggtgaatcgcattaacgttggcaatatgcactacgccaatggcaaacaacaaatcgccaaaacggtttctgtggatgcgggcgatatcgcagcatttaacgacctgaaaaccgctggggtggaatgcttcgttcagggcgtcccgacagagcctgctgtggacctctttaaattactttgagggattcatcatggaaatcagcctgttgcaggcatttgcgttgggcattatcgcctttatcgctggcctggatatgtttaacggcctaacccatatgcaccgcccggtggtcctcggcccgttggtcgggctggtacttggcgatctgcataccggaattttaaccggcggtacgctggaactggtgtggatggggctggccccgctggcgggcgcacagccgcctaacgtgattatcggtactatcgtcggcacggcgtttgccattactactggcgtgaaacccgatgtcgcagtaggtgtcgccgtacctttcgctgtcgcagtacagatggggattaccttcctgttcagcgtgatgtccggcgtgatgtctcgctgcgacctggcaacaaacccgcgccgcatttgatgctggtgccgacggcctggtgcattgctataacgggatgacaggtttacatcaccgcgaaccgggaatggttggcgcgggattaacggacaagcgcgcctggctggaactgatagccgatggtcatcatgtgcatccggcggcaatgagcctgtgttgttgctgtgcgaaagagagaatcgtactgatcaccgacgcgatgcaggcagctgggatgccggatggtcgctatacgttatgtggtgaagaagtgcagatgcacggtggcgttgtccgtaccgcgtctggtgggctggcgggcagtacgctgtctgttgatgcggcagtgcgcaatatggtcgagttgacgggcgtaacgcctgcggaagccatccatatggcgagcctgcatccggcgcgaatgctgggtgttgatggtgttctgggaagccttaaaccgggcaaacgcgccagcgtcgttgcgctggatagcgggctacatgtgcaacaaatctggattcagggtcaattagctagcttttgatagtttgctcctttattgggccttcacttcccccgtaaggcctttctttttctttcgttttgatctgtgcagcggtgtcggatgcgacgctaacgcgtcttatccgacctacagttggtgaccgcaaggccggataaagcgtttgcgccgcatccagcaatcccttttgcttcctttatcttttctttcaacgatcacaaatttcgttttatttcttttttctccattgaactttcagtttcttttctatagattttaatcaacgaaagacatcaccaagtgaaatgaaacgaaaggcaagtgaaagcgacaacgcccgacgtcaagttcatcagactaaggattgagttatgccagaaaattacacccctgctgccgccgcaaccggtacatggactgaagaagagatccgccatcagcctcgcgcatggatccgtagtctcaccaacatcgacgcgctacgttccgcgctcaataacttccttgaaccgttactgcgcaaagagaatctgcggatcatcctgaccggagccggaacgagcgcatttatcggtgacatcatcgcgccgtggctcgccagccataccggtaaaaacttcagcgccgtaccgaccaccgatctggtcaccaatccgatggactacctgaacccagctcatccgctgctgttgatctccttcggtcgatccggcaacagcccggaaagcgtcgcagccgtggaactggcaaatcaatttgtaccggaatgctatcacctgccgatcacctgcaacgaagcgggcgctctttaccaaaacgcgatcaacagcgataacgcgtttgccctgctgatgcccgcagaaacgcacgatcgcggctttgcgatgaccagcagcattaccaccatgatggccagctgcctcgcggttttcgcacctgagacgatcaacagccaaaccttccgcgacgtggcggatcgttgccaggcgatcctgaccagtctgggcgatttcagcgaaggtgtgtttggttacgcaccgtggaaacggatcgtttatctcggtagcggtggcttacagggcgcagcacgcgagagcgcgctgaaagtgctggaactgacggcgggtaaactggcggccttttatgattctccaaccggattccgtcatggaccaaaaagcctggtcgatgacgaaacgctggtggtggtatttgtctccagccacccttacacccgtcagtatgatcttgatctgctggctgaacttcgccgtgacaaccaggcaatgcgtgtaatcgccatcgccgcggaaagcagcgacatcgtcgctgccggtccacatatcatcctgccaccgagtcgtcactttatcgacgttgagcaggcattttgcttcctgatgtacgcccagacgtttgcactgatgcagagcctgcacatgggcaatacgccggataccccaagtgccagtggcaccgttaaccgcgtggtgcaaggcgtaatcattcatccgtggcaggcataagaggatcgcattatgagcattatctccactaaatatctgttacaggacgcccaggccaatggctacgcggtgcctgcttttaacattcataacgccgagacgatccaagcgatcctcgaagtgtgcagtgaaatgcgaagcccggtgatcctcgccggaacgccggggacctttaaacacatcgcgctggaagagatctacgccctgtgtagcgcctattccacaacctacaacatgccactggcgctgcatctcgaccaccacgaaagcctggatgatattcgccgtaaagtccacgcaggtgtgcgcagtgcgatgatcgacggcagccacttcccgtttgccgagaacgtgaagctggtgaaaagcgttgttgacttctgccacagtcaagattgcagcgtggaagcagaactgggccgcctgggcggtgttgaagatgacatgagcgttgacgccgaaagtgcattcctgaccgatccacaagaagctaaacgctttgtcgaactgactggcgtcgacagcctggcggtagcgattggtacggcgcacggcttatacagcaaaacgccgaagattgatttccagcggctggcggaaattcgtgaagtggtggatgttcctctggtgctgcatggtgccagcgatgttccggatgaatttgtccgtcgcactattgaacttggcgtcacaaaagtgaacgttgccacagaattaaaaatagccttcgctggcgcggttaaagcctggtttgcggaaaatccgcagggtaacgatcctcgttattatatgcgcgtcggaatggatgcgatgaaagaagttgtcagaaataaaattaatgtctgtggtagtgcgaatcgaattagtgcataatcattagttttttatgatttatcccaatgtacttcccgattaatatcggggagtgccttaatggaaaaggagataactaaaccttaataaatacatcactacaatatcgcaacaataatatatttaaaaaaattatattattcaactttatggtgaggattacacaatgaccagtccaaatattctcttaacccgtattgataaccgtctggttcacggtcaggttggcgtgacctggacatccaccatcggtgcaaatctgctggtagtcgtggatgatgttgtcgctaacgatgatattcaacagaaattaatgggtattaccgcggaaacctacggctttggcattcgtttctttactatcgaaaaaaccattaacgtcatcggcaaagctgcaccacatcagaagatcttcctgatttgccgtacgccacaaacggtacgtaaattggtagaaggtggtattgacctgaaagatgtcaacgtcggcaatatgcatttcagcgaagggaaaaagcaaatcagcagtaaagtttatgtcgatgaccaggatctcacggacttacgttttattaaacaacgtggcgtgaatgttttcattcaggacgtccctggcgatcaaaaagaacaaatccctgactaaatctaaaatcgccttaatattggtttgaggtaataaaaatgcatgaaataaccctacttcagggattatccctggcggcgttagtttttgttctggggattgatttttggctggaagccttatttttattccgcccgataatcgtttgtaccctaactggcgctattctcggtgatattcagactggcttaattaccggtggtctgacagagttggctttcgccggattaacccctgcaggtggtgttcagccgcccaacccgattatggcgggtctgatgaccaccgtcattgcatggtctacgggcgttgatgccaaaacagcaattggtcttggcctgccgtttagtttgttaatgcagtacgtcattctgttcttctattccgctttcagtttatttatgaccaaagccgataaatgcgcgaaagaggcggatacggcagcgttttcccggcttaactggacaacgatgctcatcgtcgctagtgcgtatgcggtgattgctttcctctgtacttacctggcacagggggcgatgcaggcgctggtgaaagcgatgcccgcctggctgacccacggctttgaagtggctggcggtattctgcctgccgttggttttggcttgctgctgcgcgtaatgttcaaagcgcaatatatcccttacctgatcgccggtttcctgtttgtttgctacatccaggtcagcaacctgttgccggttgccgtactgggcgcaggctttgcggtgtatgagtttttcaatgcgaaatcccggcagcaagcgcaaccgcagcccgttgccagtaaaaatgaagaagaggactacagcaatgggatctgaaatcagtaaaaaagatatcacccgtctgggctttcgtagcagcctgctgcaagcgagctttaactacgaaaggatgcaggcgggcggttttacctgggcgatgttgccgatcctgaaaaagatttataaggacgacaaaccgggcttaagcgcggcgatgaaagataacctcgaatttattaatacccacccgaatctggtcggattcctgatggggttattaattagcatggaagaaaaaggagaaaaccgcgacaccattaaaggcctcaaagtggcactgtttggcccaatcgccgggattggcgatgcgattttctggtttactttgttgccgattatggcgggaatttgcagtagttttgccagccagggaaacctgctggggccgattctatttttcgccgtttacctgcttatctttttcctgcgcgtcggctggacccacgtcggttatagtgtcggcgtgaaggcgatcgataaagtgcgagagaacagccagatgattgcccgtagcgcaaccatcctcgggatcacggtaatcggcgggctgatcgctagctatgtgcatattaacgtggtgacaagctttgccatcgacaatacccacagcgttgcgctgcagcaggatttcttcgataaagtcttcccgaacattttaccgatggcctacaccctgctgatgtattacttcctgcgggtgaaaaaagcgcatccggtgctgttaatcggcgtgacttttgtgctctctattgtttgttccgcattcggcattttgtaaatggaacgaggcactgcgtctggtggtgcctctttacttaaggaatttcatcctgtgcaaacccttcagcaagttgaaaactatacggcgttaagtgaacgtgccagcgaatatttattggccgtgatccgtagcaaaccgaatgccgtgatttgcctggcgaccggagccacgccattactgacgtatcattatctggtagaaaaaatccaccagcagcaggttgatgtcagccagctcaccttcgtgaagctcgacgaatgggtggatctgccattaacgatgccaggcacctgcgaaactttcctgcaacagcatatcgtgcagccgctggggctacgtgaagaccagctcatcagctttcgctccgaagagataaatgagacagagtgcgaacgggtaacgaacctgattgcgcgcaaaggcggtctggatttatgcgttctcggattggggaaaaacggtcatcttgggctgaacgaaccgggagaaagcctgcaaccggcctgccatatcagtcaacttgatgccagaacacagcaacatgagatgttaaaaaccgcgggtcgccccgtgactcgtgggatcaccttaggcctgaaggatattctcaatgcccgcgaagttttgttactggtgactggcgaaggaaagcaggatgcgacagatcgttttctcacggctaaagtctctaccgctatcccggctagttttttatggctgcacagtaactttatttgtttaattaacacctaaccagatgaaaaatttgctcaaaatgtttaaattaacttatgtaacagtcacgcattatattaaataacatttgactgggttgaacataacgccgatagcaaaaggagttatgttcaacaatttaattttagatatacatataacttgttctattaataaatcacctcgtattctgactcgccccctggcgcagcaaagtcaggcatttatactcttttgaatacatagaaaattgatatcaatataatgaaaatatcaaatatttgcatataaatataatcttaaagttcagtctatttaatgttcaatgaaatatttctgcctgtataatctttaaagatgttgaacatatattcacattaaatatgattatgtacttgttacaaggataaggttatatatgaataaagttacaaaaacagctattgcgggcttacttgcgcttttcgcaggtaatgccgctgcaaccgatggtgaaatagtttttgatggcgagattttaaaatccgcttgtgaaatcaatgactctgataagaaaattgaagttgctcttggtcactataatgccgaacagtttcgtaatattggcgagcgtagcccaaaaattccattcactattcctttagttaactgcccaatgactgggtgggagcacgataacggcaacgttgaagcgtctttccgtctatggctggaaacgcgagataatggcaccgtccctaacttccctaatctggcaaaagtaggctcttttgctggcatagcggcaacaggtgtgggtatccgtattgacgatgcggaaagcggaaacattatgccactgaatgctatgggcaatgataacacggtttatcagatcccggcggaatccaatggtattgtcaatgttgacctcatcgcttactacgtaagtaccgtagttccaagtgaaatcaccccaggggaagcagacgctatcgttaacgtaacgctggattaccgttaatacgttagggcgttatctgacctgtcagataacgcccttttccttcctctttctcgttgtatcaggttgaaaaataactatgagtaaacgaacattcgcggtgatattaaccttgttgtgtagcttctgtattggccaggcgcttgcaggaggaatcgttttacagcgaacgcgagtgatctatgatgccagccgcaaagaggctgcgttacctgtcgcaaacaaaggcgcagaaacgccttatttactgcaaagttgggtagataatatagatggtaaaagccgtgccccatttattataaccccaccgctatttcgtcttgaggctggcgatgacagtagtctgcgaattattaaaacagctgataacctgcctgaaaataaagagagcctgttctacattaatgttcgtgccattccagcaaagaaaaaaagtgatgatgttaatgctaacgagttgacgctggtatttaaaacacggatcaaaatgttttatcgccccgcacacctgaagggacgggtaaacgatgcgtggaaaagtctggaatttaaacgtagtgaccatagtctcaatatatataacccaactgaatattacgtcgtatttgccggactggcagtcgataaaaccgatctcacaagcaaaattgaatatatcgcgcccggagaacataaacagttaccacttcctgcatctggcggaaagaacgtgaaatgggctgcgatcaatgattatggcggcagttccgggacagaaactcgtccactgcaataaaaaatataaaaacacaggtcatcagggaatgccacaacgacaccaccagggacataaacgcacaccgaaacagttggcgctcatcatcaaacgttgtttgccgatggtgctcactggcagcggcatgctttgcactaccgctaacgccgaagagtattatttcgaccccattatgctggaaaccacaaaaagtggtatgcaaacaaccgatctgagccgttttagtaaaaaatatgcacaactaccaggaacttatcaggttgatatctggctgaataaaaagaaggttagtcagaaaaaaattacatttaccgccaatgcagagcaacttctgcagccacagtttacggtagaacaactacgtgagctgggtattaaggtggatgaaatcccggcgctggctgaaaaagatgacgatagcgtgatcaacagccttgaacaaatcattcccggtacagctgctgaatttgatttcaatcatcagcaacttaatttgagcattccccaaattgcactgtaccgtgatgcaagaggttacgtctccccttctcgttgggacgatggtataccaacgctgtttaccaactacagctttacaggttctgataaccgttaccgccagggcaatcgtagccaacgacagtacctgaatatgcaaaatggtgctaattttggcccctggcgattacgcaactattccacatggacacgcaacgatcagacaagtagctggaataccatcagtagttatttacaacgtgatatcaaggcgttgaagtctcagttgcttctgggagaaagcgccaccagcggcagtattttttccagctacacctttactggcgtgcaactcgcttccgacgataatatgttgccaaacagccagcgcggatttgccccaacggtacgcggtatcgcaaacagtagtgcaatcgtgactatcaggcaaaatggttatgtgatctatcaaagcaacgtgagtgcgggtgcctttgaaattaacgatctctacccctcttccaacagcggcgatttagaagtcacgattgaagaaagtgacggtacacaacgtcgctttatccagccttattctagtttacccatgatgcagcgacctgggcatctaaagtatagcgcgaccgctggacgctatcgcgctgatgcaaacagtgatagcaaggaacccgaatttgctgaagccacggcaatatatggtttgaataatacttttacgctgtatggcggcctgctcggttctgaagattattatgcgctggggatcggtatcggcggcacacttggcgcactgggcgcgttgagcatggatatcaacagagctgacacccaattcgataaccagcactcttttcatggctatcaatggcgtacgcagtacatcaaagatatcccggaaaccaacaccaatatcgctgtcagctactatcgctataccaacgatggctattttagttttaatgaagccaatacccgcaattgggactataacagtcgccaaaaaagtgaaattcaattcaacatcagccagacaatatttgatggggtaagtctgtatgcctccggtagccagcaagactattggggcaataacgataaaaacaggaatatctctgttggggtttccggccagcaatggggagttggttacagcctgaattatcaatacagccgctacactgatcaaaataatgaccgcgcactctctttgaatctcagtattccgttagaacgctggttaccgcgtagccgggtttcctatcagatgaccagccagaaagatcgcccaacccaacatgaaatgcgtcttgatggcagtctgctggatgatggtcgcctgagctatagcctggaacaaagtctggatgacgataacaaccataacagtagcctgaacgccagttaccgtagtccttatggcaccttcagtgccggatacagctacggtaatgacagcagccaatacaattacggcgttaccggcggcgtggttatccatcctcatggcgtgacgctcagccaatatctgggcaacgcttttgcgcttatcgatgctaacggagcatctggcgtgaggatacaaaactatccggggattgctaccgatccttttggctatgcagtggttccttatctcacaacttatcaggaaaaccgtctcagcgtagatactacgcagctgcccgataacgtcgatcttgaacaaacaacacagtttgtggtgcccaacagaggtgcaatggtagcggcgcgtttcaacgccaatatcggttatcgcgtacttgttacagtcagcgatcgcaacggtaaaccgttgccctttggcgctcttgccagcaacgatgatacggggcaacaaagtatcgtcgatgagggcggcatactatatctctctgggataagcagtaaaagtcaaagctggactgtacgctggggaaatcaggcagatcaacaatgtcagtttgctttcagtacaccggatagtgaacctacaacctctgtattacaaggcacagcgcagtgccattaaggataaaaaaatgaaaagagcgcctcttataacaggtcttttgttgatatccacatcctgcgcttatgcctccagtggagggtgtggagccgacagcactagcggtgcgacaaattacagcagtgtggttgatgatgttacggtgaaccagacagataacgtgacaggacgggagtttacctctgcaacgctaagtagcactaactggcaatacgcctgttcctgctctgcgggtaaggcagttaaacttgtctatatggtcagccccgtacttaccaccactggacatcagacaggatattacaaactcaatgacagcctggatattaaaaccacattacaggcaaacgacattccaggactcacaaccgaccaggttgtctctgttaacacccgattcacacagataaaaaacaacacggtatattctgctgcaacccaaacgggtgtttgccagggtgatacgtctcgttatggacccgttaatattggtgcgaacaccacctttaccctgtatgtcaccaagccatttctcggcagcatgaccattccgaaaacggatattgccgtcattaaaggcgcgtgggtcgatggaatgggaagcccgtctacaggtgacttccatgatttagtcaagttaagcattcagggaaatctcaccgccccacagagctgcaaaattaatcagggcgatgttattaaggttaattttggattcatcaatggtcagaagtttaccacccgcaatgccatgccagacggttttactccagtagactttgatatcacttatgactgtggtgatactagtaagattaaaaacagcttgcaaatgcgcatcgacggtacaactggggtagtagaccagtacaacctggtcgccaggcgaagaagtagtgacaatgtgcccgatgtcggtattcgtattgaaaatctcggcggcggagttgcaaatattccttttcagaacggtatccttcccgttaatccttccgggcatggcaccgtcaatatgcgcgcctggccagttaatctggtcggtggtgagctggaaacaggaaaatttcagggcacagccaccattaccgtcatcgtgcggtaaaagaagacgttgcgttttgattaacgcaacgcttcggcactgttacccctgctgctccagcgcatacttatacagcgcatttttcttcacgccgtgaatttctgcggccagcgccgccgcttttttcagcggcagttctgcctgtagcagcgccagcgtgcgcagggcatcggcgggtaagtcttcttcctgtgctttatgaccttcgacaatcagcaccatttcgcctttgcgacggttttcatcttcctttacccacgccagcagctcgccaacgggcgcgccgtgaatggtttcccaggttttggtcagctcacgcgccagaaccacgtagcgggattcgcctaataccgcaacgatatcttccaggctatctaacagacggtgggtagattcataaaaaatcagcgtgcgcggctccgcttcaatggcttttagcgcatcacggcggcctttacttttggcaggtaaaaagccttcgtaacagaaacggtcagagggtaaacccgctgcgcttaacgcagtgatagcagcacacggcccgggtagcggcaccacgcggatccccgcttcacggcaggtacgcaccagatggtagccaggatcgttaattagcggcgttccggcatcggaaaccagcgcaatgttttgcccctcttgcagcttcgccagcagcgtttcagctttttgttgttcgttatggtcgtgcagcgcaaacaaccgggcattaatcccaaaatgttgcagcaataaaccggtgtgacgagtatcctcggcggcaatcagatcaacggcctgtaatacctctaacgcacgctgggtgatatccgccagattgccgattggcgtcggtacaatgtaaagctggccctgagaattatccgcgctttggtgttgtttcattgtgtcgtccgtattgccgatttaatattgagcattgcgtaaaaaaaatatcactggatacattatggtacccagtacattttctcgtttgaaagccgcgcgttgtctgcctgttgttctggcagccctgattttcgccggttgtggcacccatactcccgatcagtccactgcttatatgcagggcacggcgcaggctgattctgccttttatcttcagcagatgcagcaaagctctgatgataccaggatcaactggcaattactcgccattcgtgcactggtgaaagaaggtaaaaccgggcaggcggttgagttgtttaaccaactaccgcaagaactgaacgatgctcagcgtcgcgagaaaacactgctggcggtagagattaaactggcgcagaaagattttgctggcgcgcaaaacttgctggcgaaaatcacacctgccgatttagaacaaaaccagcaagcgcgttactggcaggcaaaaatcgatgccagccaggggcgtccttccattgatttactgcgcgcgttaattgctcaggaaccgctgcttggcgcgaaagaaaaacagcagaatattgatgccacctggcaggcgctctcctccatgactcaggaacaggcgaatacgctggtgatcaacgccgacgaaaatattctgcaaggctggctggatctgcagcgcgtctggtttgataaccgtaacgatcccgacatgatgaaagccgggatcgccgactggcagaaacgttatccgaacaatccgggcgcgaaaatgctgccaacgcagttggttaacgtaaaagcgtttaaaccagccagcaccaacaaaatcgccctgctgttgccactgaatggccaggcagcggtatttggtcgcactattcagcaaggctttgaagcggcgaaaaatatcggcactcagccagtggcagctcaggtagctgccgcacctgccgcagacgtagctgaacaacctcagccgcaaaccgtggatggcgttgccagcccggcacaagccagcgttagcgatctgaccggtgaacagcctgcagcccagccggtgcctgtaagcgccccggcgacaagcaccgcagcggtaagcgcacccgcaaatccatccgcagagctgaaaatctacgataccagtagtcaaccacttagccagatcttaagccaggttcagcaggatggcgcgagtattgtggtcggtccgttgctgaaaaataacgttgaagagttgctgaagagcaacactccgctgaacgtactggcactgaaccagccggagaatatcgaaaatcgcgtcaatatttgttacttcgcgcttagtccggaagacgaagcgcgcgatgcagcgcgtcatattcgtgaccagggtaaacaagcgccgctggtgctgatcccacgcagtagtttgggcgatcgcgtagccaatgcgtttgcgcaagagtggcagaaactgggcggcggcaccgttctgcaacaaaaatttggttccaccagcgaattacgcgcgggtgttaacggcggttctggtattgctttaacgggtagcccgattactctcagagcgacaaccgactccggcatgacgaccaacaatccaacgctgcaaaccacgccaaccgatgaccagttcaccaataatggcggtcgtgtcgatgcggtgtacattgtggcaacgccgggtgaaatcgcttttatcaaaccgatgatcgccatgcgtaacggtagccagagcggtgcaacgctgtacgccagctcccgcagtgcgcaagggaccgctggcccggatttccgactggagatggaaggcttgcagtacagcgaaatcccgatgctggcaggcggtaatctaccgttaatgcagcaggcactcagcgcggtgaataacgattatagtctggctcgcatgtatgcgatgggcgtcgatgcctggagcctggcaaatcatttcagtcaaatgcgccaggttcagggttttgaaatcaacggtaataccggaagcctgacggctaacccggattgcgtgattaacaggaacttaagttggctacagtaccaacaaggtcaggtagtccccgtcagttaaattaagtgattaacaggaacttatcatggctacagtaccaacaaggagtggtagtccccgtcagttaaccaccaaacagaccggcgatgcgtgggaagcacaagcgcgtcgctggctggaaggcaaaggactgcggtttatcgccgctaacgtgaacgagcgtggcggcgagatcgatctgataatgcgtgaaggccggaccaccatttttgtcgaggtacgctatcgccgctctgcgctttatggcggcgcggcagccagtgtgacccgcagcaaacaacacaaattattacagactgcccgcttgtggctcgcgcgtcataatgggagttttgatactgtggattgccggttcgatgtggtagccttcaccgggaatgaggttgagtggattaaggatgcctttaatgaccacagttaattaaggtttaaggattagcgtgcaagaaagaattaaagcttgcttcactgaaagcattcaaactcaaattgcggcggcagaggcgcttccggatgccatctcccgtgcagccatgacgctggttcagtctctgctcaatggcaacaaaatcctctgttgtggtaatggaacttccgctgccaatgcacagcattttgctgccagcatgatcaaccgtttcgaaacggagcggcccagcttacctgccattgcactaaatactgataatgttgtcttaacggcgattgccaacgatcgcttacatgatgaagtgtatgcaaaacaggtgcgggcgctgggtcatgcgggagatgtattgttagccatttccacccgtggcaacagccgcgatattgttaaagcagttgaagccgccgttacgcgtgatatgaccattgtggcattgaccggctatgacggcggcgaacttgcaggtttgttagggccacaggatgtggagatccgcattcctagccatcgtagtgctcgcattcaggaaatgcatatgctgacggtaaattgcctgtgcgatctgatcgataacacgcttttccctcaccaggatgattaaggagaatacatgaaggcattaagcccaatcgcagtccttatttccgcgctgctgttgcaaggttgtgttgccgctgccgtagtgggtaccgctgctgtgggtaccaaagccgcaactgacccacgcagtgtcggcacccaggtggacgatggtaccctggaagtgcgcgtgaacagcgcattgagcaaagacgaacagattaagaaagaagcgcgcattaatgtaacggcctatcagggcaaagtgctgctggttgggcagagtccaaatgctgaacttagcgctcgcgccaaacagattgctatgggcgtagacggtgccaacgaagtgtataacgagattcgtcagggccagccgattggtctgggcgaagcatctaacgatacgtggatcaccaccaaagtgcgtagccagctcttaaccagcgacctggtgaaaagctccaacgtgaaagtgaccaccgaaaacggtgaagtgttcctgatggggctggtgactgaacgtgaagcgaaagcggcggcagatattgccagccgggtgagcggcgtgaagcgggtaactacggcgtttacgtttattaaataacagccccttgtaatgcctgatgcgacgcttgccgcgtcttatcaggcctacaacgatacaaaccgtaggtcagataaggcgtttacgccgcatccgacatgttttccctcaaatcagaacaacagcgccagcccgccgacaatcacaccagacactgccaccatcgcccctgtcagccataaggctttcgccgggaacgctttgcgcagcataatcagactcggcaaactcactgccgggagcgtcatcaacaatgccagcgccggagcggttcccatacctgccagcatcatcgtttgtacaatcggaatttctgctgccgtgggaatgacaaacaagcatcctgctaccgccatcgccaccacccacatcaggctgttatcgacagcaccatcggcatgggggaataaccagacgcgagcggcacccaacaccagtactgcaaggatgtaaaccgggatcgtactccagaaaagcgtccatagcgccctgccccagcggctaaaaaacccgccctgtgcttccggtatgtcaatttcgaccggtgcctgcgtttgcggtgtttcacgcacccatttttgcaccagcgtcgcaatcagcaacaccatcaccagcccggccaccagacgaatcgccgcaaaaccccagccgaggacaaagcccataaacaccagcgtcgccgggtttaacaccggattgcccatccagaatgccagcgcaccgcccatgctcacctgttggcgacgcattcccgccgcgaccggagccgcacagcaggtacacatcatgcccggcaagctaaacagcgttcccagcagcgtgccgcgaaagcggctttgcccaagcgtacgcaacaaccagtcacgcgggatcagcacctgaatcaagctaccgaggatcacccccagcaccgccgctttccataccgcgaggaaatagatcatcgcgtaatccaacgccgcctgccatgggttagcatccgcctgcgcaaggatagatttaccgatactgtgggtttcggcagcagtaaacgctttgccgtagtaaggttcccatttcacataccagagaccggcaatgacaacgagaaagaaaagcgcgggtttccaccactgaatgggcgttgccgcctgagaactagactgaccagtcatagcattccccaggaataagttatgataattgagcgcgtgaatattacgctcactatcaattcttgggaataattattcagctcttttgcgtaattcactagagcttaaaatcgtcacgccttcatgctcaggccgcatgctctctgccagcatgacccgcgccacgtctctcgcatcaatggatttccagttacctggtaacaaacggaacagcggcgcaaaaagcgtttcgttcatccgctgtttgctacgatcgcccagtaacatgctcgggcgagcaatggtcaatttcggccagttctgggcgattaatgcttcttccatctcccctttgacgcggttatagaaaaacgggctgtgggcattggcacccatcgcactgactaccaacatatgctgcgcgcccagtcgccgcccggttaatgcggtatccactaccagcgtgtaatcggcatgaataaacgcctctttgctccccgcttctcgccgcgtggtgccgagacaacaaaacacaatgtcgatgggatcggtgacctgcgccaacgcgtcactcagttgcggatcatggggattaaacaccccgggcatatcgcccaacggacgtcgcgtcggcgcagcaatggcgttaactttcggttcgttaatcaacatccgcagcaggtgaccgcccaccagccccgttgcgcctgtaatcagtacctgactcatcttcgctcctttacagaattgtctgccttgcgctccacggctcatgcaccaggcttaatagaccatgaggtaattatccccgattgtgggaaattcgcctcatccaatgcaacaacgcggaggaagcatgagtaagaaaattgccgttttaatcactgatgaatttgaggatagtgaatttactagtcccgcagacgagttccgtaaagccggacacgaagtgattaccattgaaaaacaagcgggtaaaacggtgaaaggcaaaaaaggagaagccagcgtgaccatcgataaatccatcgatgaagtgacgcctgcggagtttgatgccctgctgctaccgggcggccatagtccggattatctgcgtggggacaaccgttttgtcacctttacccgtgattttgtgaatagtggcaaaccggtgtttgccatctgtcacggcccgcagttgctgatcagcgccgatgtgattcgggggcgcaaactgaccgcagttaaaccgatcattattgatgttaaaaatgcgggcgcggaattttacgatcaggaagtcgtggttgataaagatcagctggttaccagccggacaccggacgatctgccagcgtttaaccgcgaggcgttacgcctgctcggtgcctgattacgcctgctcggtgccactgtcgcgtagccaaatcatttttttaccaaagcccagcgtgttgtcggtgaatttgatttcatcgagccggatttcccacaccggggcgctcagcattctggcaaccggaaagcgacgattgtacgccttgcgcgcgaggtcgctttcctcaccttccagcctgcggatctcacctttaaactgcacaccgcgaattaacgctaccgttttcggctgaccgtttaccgttccggcaaccgcagcctgcggcccactcatctgcgcgtggcgcgttttttcttccgtcaaaatgtagaaggcgactttctgcgcatcaaaaagataaaaggcattagcgcaccagagttccccttcctgctgcacacaccaagtgacaacatgttgttttgccagccaacggctgatggcgatgagtgtttccattgctgttctcttttatactgtgggcctgaccttaacatgcgacgcagacgatgacaccctggtttctttacttgatccgtaccgccgacaataagctttataccgggatcaccacggatgtcgaacgccgctatcagcagcaccaaagcggcaaaggggcgaaagcactgcgcgggaaaggagaactaacgctggtgttttccgcgccagtgggcgatcgtagcctggcgttacgggcggaatatcgcgttaagcaactgaccaaacggcaaaaagagcgtctggtagcggaaggcgcagggtttgcagagctgttaagcagtctgcaaaccccggagattaaaagcgattgaaatgctcgtgatactcaaccaggccggtaacgccattcagcgcgtcatccgctaaacgatgtacctggaaggcgctttcagtgcccggccagcggcaacgcagatcgtgatgcgccgccagttcaaagccgaaacgactgtacagcgccggatcgcccagcgtcaccactgcggcatagccgaactcattaaggctatcgagtccttcatagaccagttggcgtgccagcccctgtccacggtatttttcatcaaccgccaacggtgccatgccgacccattgcaggtcttcgccctgcacatcaaccggactaaatgccacatagccaatgacctgaccttcgtcatctgtcgccaccagccccagcgtcagaaagccatcttcacgcagatcgtgaaccagcttcgcttccgcatcactttcgaaactgcgacgcagcagggcatcaatacccggcgcatcaatgggaatttctactcgaattagcatggttcacctacgcttgtctgtttggtttcaggcgcggttttcattcccgcctcaacaaaatccgccagttgcagcagcatcatgcgtaaggctttcggcatttgctccagttcaatggcgtccatcaggtttttcacatacagccccagctccgtatcgccttcaatcaccagccgacgctggaagaagagcgtatccggatcttgtttacgcgccgcaatcatcagcagatcgctggcgtcggcactaaaactcacatcagcttgcgcgttctggctaacgaccagtttgccattcaccacgctggtaaaccattgcaggtcaatatcacgcacatgaatacttaaccagcggccttcaagaaactccagctcgccatcatccagcgcctggcggaattgccagcttaagacctgctcaagaacctggcgttttagcgcaaatggcgtcagttttaccggtacactcaacagagatggccccaaatgcacaatacgggaacgcagtttatccaacacgagttttactccctgtttcaacaatcatcctattttgccatatcagaaaaataacatagcggtataaatcaacaattccatatgaaattgctgctaccaccaatacaactttaactgccttaaatcaaaaattgtcgcagcaaggttaactaaaatcccagttcgttaacatttttgcgttttgatagcgcaaccttcaggaaaaattatggagctgctctgccctgccggaaatctcccggcgcttaaggcggccatcgaaaacggcgcagatgctgtttatatcgggctaaaagatgataccaatgcccgtcacttcgccggccttaactttaccgagaaaaaattgcaggaagcggtgagttttgtccatcaacatcgccgcaaacttcacatcgcgattaacacttttgcgcatccggacggttacgcccgttggcagcgcgccgtggatatggcggcgcagctgggtgccgacgcgctgatcctcgccgacctcgccatgctggagtacgccgccgagcgttatccgcatattgagcgccacgtaagcgtgcaggctagcgcgaccaatgaagaggcgattaacttttatcatcgccattttgacgttgctcgcgtggtgctgccgcgcgtgttgagcattcatcaggtgaaacaactggcacgggtcacacctgtaccactggaagtctttgctttcggcagcctgtgcattatgagcgaaggtcgttgctatctgagcagctatctgacgggtgagagccccaacaccataggcgcgtgttctccggcccgtttcgtgcgctggcaacaaacgccgcaggggctggaatcccgcctgaacgaagtgctgatcgaccgttatcaggacggcgaaaacgcaggttatccgacgctatgtaaagggcgttatctggtggacggcgagcgctatcacgcgctggaagaaccaaccagtctcaataccctggaactgctgccggagttaatggcggcgaatattgctagcgtgaaaattgaaggccgccagcgtagcccggcgtatgtcagccaggtggcgaaagtctggcgtcaggctatcgaccgttgtaaggccgatccgcaaaactttgtaccgcaaagcgcgtggatggagacgctcgggagcatgtccgaaggcacgcaaaccactcttggcgcatatcaccgtaaatggcagtgagaaaagcaatgaaatattccttagggccagtgctgtggtactggccaaaagagacgctggaagaattttatcagcaggccgccaccagcagcgccgacgtgatttatcttggtgaagcggtatgcagcaagcgtcgggcaaccaaagttggcgactggctggagatggcaaaaagcctcgccgggagtggtaagcagattgtgctctccacgctggcgctggtgcaggcaagttctgaactgggcgaactgaaacgctatgttgagaacggtgagtttctgattgaagccagcgatctcggcgtggtgaatatgtgcgctgaacgcaaactgccgttcgtcgccgggcacgcgctgaactgctacaacgcggtgacactgaaaatattgctcaaacagggcatgatgcgctggtgtatgccagtggagctttcccgcgactggctggtgaatctgcttaatcagtgcgatgagctgggcattcgtaaccagtttgaagtggaagtcctgagctacggtcatctgccgctggcctactccgcccgctgctttaccgcgcgtagcgaagaccgcccgaaagatgagtgtgaaacctgctgcattaagtatccgaacgggcgcaacgtgctgagccaggaaaaccaacaagtgtttgtactcaatggcattcagaccatgagcggctacgtttacaacctcggtaacgagctggcatccatgcagggcctggttgatgtggtccgcctgagtccgcagggtactgacactttcgcgatgctcgacgccttccgcgctaatgaaaatggcgctgcaccactgccgttgacggcgaacagcgactgtaacggctactggcggcggctggcaggactggagctgcaagcctaagtaaatagctcactttgttaacaactttaactactctttaatgcagtattaaagattaatcggtaacaaagtgagctgttatgactgataaaaccattgcgtttagcctactcgatctggcccccattcccgaaggttctagtgcgcgagaagcattctcccactctctcgatctcgcccgtctggctgaaaagcgcggctatcatcgctactggctggcagaacaccacaatatgactggcattgccagtgctgccacgagcgtattgatcggctatctggcggcgaataccaccacgctgcatctggggtctggcggcgtgatgttgcctaaccacagtccgttggtcattgcagaacagttcggcacgcttaatacactctatccggggcgaatcgatttggggctgggtcgtgctccgggtagtgaccaacggacaatgatggcgctacgtcgtcatatgagcggcgatattgataatttcctccgcgatgtggcggagctggtggactggtttgacgcccgcgatcccaatccgcatgtgcgcccggtaccaggctatggcgagaaaatccccgtgtggttgttaggctccagcctttacagcgcgcaactggcggcgcagcttggtctgccgtttgcgtttgccagtcacttcgcgccggatatgctgttccaggcgctgcatctttatcgcagcaacttcaaaccgagtgcacggctggaaaaaccatacgcgatggtgtgcatcaatattatcgccgccgacagcaaccgcgacgctgaatttctgtttaccagtatgcagcaagcctttgtgaagctgcgccgtggcgaaaccgggcaactgccgccgccgattcaaaatatggatcagttctggagtccgtctgagcagtatggcgtgcagcaggcgctgagtatgagcttggtaggtgataaagcgaaagtgcgtcatggcttgcagagcatcctgcgcgaaaccgacgccgatgagattatggtcaacgggcagattttcgaccaccaggcgcggctgcatagctttgagctggcgatggatgttaaggaagagttgttgggataatgtgtcttaacgcgggaagccttatccgagctggcaacgctgtcctacatagacctgataagcgaagcgcatcaggcattgtgtaggcagcagaaatgtcggataaggcaccgctgattactgatacaccggcagtaaattaaagctgcttaaaatatgcaccagtgcgttgccgacgccaaacaccagaatcagcgcaatcatcggcttgccaccccagacgcggaatttcgggctgccaaagcgtttacggcttgcacgggctaacagcgccggaacaattgccgcccagatggtagccgctaaaccagcataaccaatggcgtacaggaatccgttcgggaacaacagcccccccacaactggcggggcaaaggtcagcaatgccgttttcaagcggcccacagcgctgtcgtcgaaaccaaacagatctgccagatagtcaaacaaacccagcgttacgccgaggaagctactcgctaccgcaaagttactgaacacgaccagcagcagatccagactacggctgttcagtacgccgcttaacgcctgtaccagcacatcaatattaccgcccttctctgcaataccgataaactccggacgcgggatgttacccatcgtcgccagcaaccagatggtatacagcgccagcgccatcagcgtaccgtacaccagatatttcacgatggttttcggatctttgccgtaatacttcatcaggcttggcacgttaccgtgataaccaaagcttgccagacagaacggcagggtcatcaacagatacggtgcataagacgcattgctttcggcgacgttgaacaatgtcgcaggctgcacatgccccagcaggctaccaaaggtgaggaagaaggtaatgactttcgcccccagcacaatcgctgtcatgcgactgacggctttagtgctcaaccacaccacaaacgctaccagcaatgcaaaaccaaaacccgccgcccgtgccgggacgtttagactcatctctgcgaaggtgtgatgcagaatgctaccactggcagaaatataggcataggtcaggatatagagcacaaaggcaatggaaatgccgttgaccacgttccagcctttgcccagcaaatctttggtgatggtgtcaaaactgctaccgattctgtaattcaggttagcttccagaatcatcaagccggaatgcagcatacagaaccaggtaaagatcagcgccgccatactccagaaaaaccacgccccggacatgaccactggcagagaaaacatccctgcgccaataatggtgccgccgataatcaccacgccgccaagcaggctcggactcgtttgggtggtggttagtgttgccatgagggcttctctccagtgaaaaatagtgcgactgcgttgttatgcattgcactgtaccagtacacgagtacaaaagacagaaaaaaagccccgatggtaaaaatcggggctgtatatattattttacagattgtgttcgctgttcagcgatgattacgcatcaccaccgaaacgacgacgaccggtagaatcatcacgacgcggagcgcggccttcacgacgttcgccgctaaaacgacgaccatcaccacggccaccttcacggcgttcaccgctgaagttacgaccgccttcacgacgttcgccaccgaaaccacgaccaccgccacgacgctcaccgccagtatgcggctgtgcatcgcccagtaactgcatgttcatcggcttgttgagaatgcgagtgcgcgtaaagtgttgcagcacttcacccggcatacctttcggcagttcgatggtggagtgagaagcaaacagcttgatgttaccaatgtaacggctgctgatgtcgccttcgttagcaatcgcaccaacgatatgacgaacttcaacaccatcatcgcggcccacttcaatgcggtacagctgcatatcgccaacatcacgacgttcacgacgcggacgatcttcacggtcaccacgcgggccacggtcgttacgatcgcgcggaccacggtcatcacggtcacggaattcacgtttcggacgcatcggcgcatctggcggtacgatcagagtacgttcaccctgtgccattttcagcagtgccgcagccagagtttcgagatccagctcttcaccttcagcagtcggctgaattttgctcagcagtgcgcggtattgatccagatcgctgctttccagctgctgctgtactttagcggcgaatttttccagacggcgtttgcctagcagttctgcgttcggcagttctacttccggaatagtcagcttcatagtacgttcaatgttgcgcagcagacgacgctcgcggttctcaacgaacagcagcgcgcggccagcacgacccgcacgaccggtacgaccgatacggtgaacgtaagactcagaatccatcgggatatcgtagttaactaccaggctgatacgctcaacgtccaggccacgggctgcaacgtcggtcgcaatcaggatgtccagacgaccatctttcaggcgttccagtgtctgttcacgcagcgcctggttcatgtcaccgttcagcgcggcgctgttgtagccgttacgctcaagagcttcagccacttccagagtcgcgtttttggtacgaacgaagataatcgccgcatcaaaatcttccgcttccaggaaacgtaccagtgcttcgtttttgcgcataccccagacagtccagtagctctggctgatgtcaggacgggtagtcacgctggactgaatgcgcacttcctgcggctctttcataaagcggcgggtaatgcgacgaatcgcttccggcatggttgcagagaacagagcggtctgatgaccttccgggatctgcgccataatggtttcaacgtcttcgatgaagcccatgcgcagcatttcgtcagcttcatccagaaccagaccgctcagtttagagaggtccagagtgccacgtttcaggtggtccagcagacggcccggagtaccgacaacgatctgcggcccctgacgcagggcgcgtaattgcacgtcataacgctggccgccgtacagagcaaccacatttacgccgcgcatgtgtttagagaaatccgtcattgcttcagcaacctgtaccgccagttcgcgggtcggtgccagcaccagaatctgtggtgctttcagctcaggatcaagattctgcaacagaggtaaagagaatgctgcagtttttccgctccccgtctgggccatacccagaacgtcgcggccattcagcagatgtggaatacactctgcctgaattggagatggtttttcgtaacccagatcgttaagggcttcaaggataggagccttcaggcccagatctgcaaaagtggtttcgaattcagccatgtagtacgtgtgcctcaaaattaatggcggccagtctacataactcatcatgaaattgatcagcaattttcattgaaaagtgtgaaccggctcaaagtaggtgtattaacgaacaacaacgccctcacccgttaaggtgatggcaatcaaaaaagattacgggctgatgtgtacgtcagttattgctggtcgctttctgccaggtcatcttggtcctggcccaggaggcttaattccaacaatgcgtatcggtgctcaacaaagttatgaacgttgttggcaaccgccagtttgaacagtgccgtggcgctgtccaaatcccccagacttaggtagtacttacctaaatagaagttggtttcactgagatgctcagcgaggctggtgttatccgttgcgtccgccttgagcctttccattaacgtttgttcgctaatgttgcccaggtagaactcgacaatgttccatccccactgttccttatcgcttttttcgaagtgctgtttcaacacttctttagcctgcttctcatcgagcttctgctcggcgagataaagccacagactacggaaaggatcattgggatcgtcttgataaaacgccagcagatcatcttgcgctaacttgtcacgaccgccgtaatataatgcgatcccgcgattcaagtgcgcgtagttgtaagttggatcaagctcaagtacagaatcaaacgcttcataggcagcatcaaaattgcctgcctgcgttaaatatatgcctaagtaattgaatacttcaggcatatccggtcggattgccagcgcttggctaaaatcgttacgcgctaatgccctcagaccgagactatcatacaacactccgcgctcatataaaagctgtgcgcgttcgtcatcggttaaagcccgactggcaaggatttgttccatacgtgccagaatcacttcctgctgtaaagtcggttgcaatggtaccgcgaggacttcacttttacgccaggaagtattactgcatcctgcaagcgtaagtgctgtcgcaacgaaacaccagcgcaaaaaaggcttcatttcccactcccgaagaccacggttgaatgaacgtcctgttcccggttgctaacaaggcgtcctgcccggttaaaagccccccgccgcagcggagggcaaatggcaaccttactcgccctgttcagcagccggagcttccggtgctgcagcaggttgagactgctcagtcgcttctttaatgctcagacggatacggccctggcgatcaacttccagaactttcaccggtacttcctgacccatctgcaggtaatcggtcactttctcaacgcgtttgtcagcgatttgagagatgtggaccagaccttctttaccgccgccgatggcaacaaatgcgccaaagtcaacgatacgggtcactttaccagtgtagacgcggcccacttcgatttctgcagtgatctcttcgatacgacgaatagcatgtttcgctttctcgccgtcggtcgctgcaatcttcacagtaccgtcatcttcgatttcgatggtggtgccagtttcttcggtcagagcacggattacagaaccgcctttaccgataacatctttgatcttgtccgggttgatcttgatggtatggatacgcggtgcgaactcagagatatcgccacgcggcgcgttgatcgcctgttccattacgcccaggatatgcagacgcgcacctttagcctggttcagcgcaacctgcatgatctctttggtgataccttcaattttgatatccatctgcagtgcagagataccgtcgcgggaacctgcaactttgaagtccatatcgcccaggtgatcttcgtcgcccaaaatgtcagacagtacaacgtagttgtcgccttctttcaccagacccattgcgatacccgcaacggcagctttgatcggcacacctgcgtccatcagcgccagagacgcgccgcacacggaagccatagaagaggaaccgttggattcagtgatttcagacacaacacgtacggtgtacgggaatttgtccatatccggcatgactgccagcacgccgcgcttcgccagacgaccgtgaccaatttcacgacgcttcggagaaccgaccatgccggtttcgcctacggagtacggagggaagttgtagtggaacaggaaggtatcggtacgttcgcccatcagttcatcaagaacctgcgcgtcacgagcagtacccagcgttgcggtaaccagcgcctgcgtttcaccacgggtgaacagcgcagaaccgtgagtacgcggcagcacgccagtacgcacatccagaccacggatcatatctttttcacgaccgtcgatacgcggttcgcctgccagtacgcggctacgaacaacgtttttctcgatcgcgtgcagaatttcacccagttcgttttcgtccagggtttcgtcttcagcaagcagcgtcgcgatggtttcagatttgatgacatcaacctgcgcataacgctcttgtttgtcggtgatgcggtaagcatcgctcaggcgagcttcagccagtgcagcaacgcgcgcgtttagcgcttcgtttaccggctccggctgccagtcccaacgcggtttaccggcttctttcaccagttcattgatgttctgaataacaacctgctgttgttcatgaccgaacactactgcgcccagcatctggtcttcgctcagcagttgagcttcagattcaaccatcagtacagcggcttcagtaccggcaacaaccagatccagtttgctctctttcagctcgtcctgagtcgggttcagtacgtactggtcattgatgtaacctacgcgggcagcaccaatcgggccattgaacggaataccagacagagacagcgctgcggaagcaccaatcatcgcgacgatatccgggttaacttgcgggttaacagaaaccacggtggcgataacctgaacttcgttgacgaagccttccgggaacagcgggcgaatcgggcggtcaatcagacgcgcgatcagggtttcgccttcgcttgggcggccttcacgacggaagaagctacccgggatacgaccagcagcgtaggtacgctcctgatagttaacggtcagtgggaagaagtcctgacctggtttggcttttttctggccaacaacggtaacgaataccgcggtgtcatccatgctaaccataacagcggcagtagcctgacgagccatcatgccggtttccagagtcacggtgtgttggccgtactggaatttacgaacgatcggattaagcaatgtaatatcctttctctttcttagacagtaccttacggcactggtgttaataccgcttcttctgcgcatcctcgcgactaatgacaaccctaacccagctctatgtgggtaaagcctctcattagccgcgcgaacctctgcaacggaagatcattcatagcaacaatacattagtttccagtgaattgctgccgtcagcttgaaaaaaggggccactcaggcccccttttctgaaactcgcaagaattagcgacgcagacccaggcgctcgatgagctgggtgtaacgtgctacgtctttacgtttcaggtagtcgagcagtttacgacgctgagaaaccatgcgcagcagaccacgacggctgtggtgatcttttttgtgctctgcaaagtggccctgcaggtggttgatctgtgcagtcagcagtgctacctgaacttcggtagaaccggtgtcgtttgcgtcacgaccaaactcagaaacgattttagctgttgcttcagtacttagagacattttaaaactccaaagtatatagaatgaaaggacgccgatctctaattcagcgatcccagtgtacgttacgcaaagtgttaaacaatttacgcgacgttaagcggcagtattctactcgtagcgacctgttatcgcaagacggttaacattacgccgggtattcaaccaccaggcgacgaggcgcaacgcggccttcatcgtcaatttcgcccataccgataaatttgccgttctcaccttccgtgacgcgaaccagtccttccagtggcgcaccagatgtacgaaccgggttaccatttttgaagtaaacagaagacgttaacggaagattcaccaccggatagtcgctagctggactgtccattggcatcagtaatggatcaagtaactccgcggctggaatatcctgctgttcagcttgctcaacaagttcacgcaggtgctccagggtcaccatccgttcaaccggatatttacttaccgccagacggcgcaggtaaataacatgcgcgccacagccgagtttttcacccaggtcatcaatgatggtgcggatataagtgcctttactgcagtgaatttccagctccagctcattgccttcatggcgaataaacagcaattcataaacggtaatcggacgcgcttcacgcggaacttcaatgccctgacgcgcatattcgtacagttttttgccctgatatttcagtgcactatacatgctagggatctgttcgatatcgccacggaaagtatccagtgccgctgccagctgctctgcgctaaaggttaccggacgttcttcaacgatctgtccgtcggcatcagaagtatcggtacgctgtccaagacgcgcaatgacccgatagcgtttgtcggagtccagcagatactgggaaaacttcgtcgcttccccgaggcaaatcggcaacatgccggtcgccagcgggtccagcgcaccggtatgcccggcacggttggcgttatatatacgtttcactttttgcagcgcatcgttgctggacataccctgaggtttatccagcaacaaaacgccgttaatgtcgcgaccgcgacgacgaggacgactcattagtcctccttgctgtcgtccgggttaacacgacgttcttcgtcatgtttgaccacgctggtcaccaggttactcatgcgcatcccttcaaccagagagttgtcgtagaagaaggtcagttccggcacgatacgcaggcgcatcgctttccccagcaggctgcggatgaaaccagaagcttcttgcaacgctttgatgcccgctttaaccgcgtcttcatctttgtcgttgaggaacgtcacatatactttggcatacgccaggtcgcgagacatttcgacaccggaaacggtggtcatcatgcccaggcgaggatctttaatttcacgctgcaggatgagagcgatctctttttgcatttcctgcgctacgcgctgcgggcgaccaaattctttcgccataataaattctcctgacaaaaaaggggctgttagcccctttttaaaattaatttcaggtggaagggctgttcacgttgacctgataagacgcgccagcgtcacatcaggcaatccatgccggatgcagcgtaaacgccttatcccgcatggaaccctaaaaaccttaagcaatggtacgttggatctcgatgatttcgaatacttcgatcacatcgccagtgcggacgtcgttgtagttcttaacgccgataccacattccataccgttacggacttcgttaacgtcatctttgaagcggcgcagggactccagctcgccttcgtggataaccacgttgtcacgcagaacgcggatcgggttgtgacgtttaaccacaccttcggtaaccatacagcctgcgatggcaccaaatttcgggcttttgaacacgtcacgaacttccgccagaccgataatctgctgtttcagttccggagacagcataccgctcatcgccgctttcacttcgtcaatcaggttatagatgacggagtagtaacgcagatccaggctttccgcttcaatcactttacgtgcagaggcatcagcacgtacgttaaagccaaccaggatggcgttggacgccgcagccagggtggcgtcggtttcggtgataccacctacgccagaaccgatgatcttcactttaacttcgtcagtagacagtttcagcaaggagtcggagatcgcttcgacagaaccctgtacgtctgccttcaggacgatattcacttcgtgaacttcgccttcggtcatgttggcgaacatgttctcgagtttagatttctgctgacgcgccagtttaacttcgcggaatttaccctgacgatagagtgcaacttcacgcgctttcttctcgtcacgtacaacggtaacttcatcacccgcagccggtacgccggacaggccgaggatttccaccggaatggacggacccgcttccagcacttcctgacccagttcgttacgcatcgcacgaacacgaccgtattcgaagccacacagaacgatatcgcccttgtgcagagtaccttcacgtaccagaacggtagcaaccggaccacgacctttatcgaggaaggattcgataaccgcaccgctcgccatacctttacgtaccgctttcagctccagaacttccgcctgcagcaggatagcgtccagcagttcatcgataccggtacccgctttcgcagatacgtgtacgaactggctttcaccgccccactcttccggcaggatgccgtactgggagagttcgttcttaacgcgatccggatcagcttctggtttatcgatcttgttcactgcaaccaccaccggtacctgcgccgctttcgcgtgctggattgcttcgatggtctgcggcatcacaccgtcgtcggcagcaacaaccaggactacgatgtccgttgcctgcgcaccacgagcacgcatactagtaaacgcggcgtgccccggggtgtccaggaaggtgatcatgccgttttcagtttcaacgtggtatgcaccaatgtgctgggtaatgccgcccgcttcgccagaggccactttcgtactacgaatgtagtccagcagagaggttttaccgtggtcaacgtgacccatgatggtcacaaccggcgcgcgcggttcagccgcagcacccgtgtcacggtcgctcattaccgcctcttccagctcgttttcacgacgcaggataactttatggcccatctcttcagcaaccagctgtgcggtttcctgatcgataacctggttgatggttgccattgcgcccagtttcatcatcgctttgatgacctgagagcctttaaccgccatcttgttcgccagttcgccaacggtgatagtttcgccgatcacaacgtcacggttaacggcctgagcaggcttctggaagccttgctgcaggctagaacctttacgttttccgcctttaccgccacgtactgctgcgcgtgcttcttcacgatcagctttactttcagcgtgtttgttgcctttcttcggacgcgctgctttcgcgttacgaccacggccacggccgccttcgacttcacgatcgctttcgtcttctgcctggcgagcatgttgagaagtagtgacgtgataatcgctggaatcttcagtcggttccgcgttatcagtccatttgttttcttccgccatacgacgtgcttcttcagcaacgcgacgtgcttcttcttcgagtttacgacgcgcttcttcttcagctttacgcttgagctctgcagcttcctgctcacggcgggctttttcagcctgggcgtttttagtcatatcgtcttgttgattgctcactttgtctttttccgcagcttcacgtttcgcttgttcagcagcttcacgcttagcttgttctgcggcctcacgttcagctttttgttgcgcctcgcgtttagcgctttcttctgcctcacgacgggcttgctcttccgcttcacgctgcgcttgctcttccgctgcaaggcgttcagcctcttgcggatcgcgtttcacaaaggtgcgtttcttgcggacttcgatttgtacgcttttgctttttccaccggtaccaggaatgttaagggtgctgcgtgttttacgttgcagcgtcaatttgtccgggccactatttttctgattcaggtggtcaatcaaagtctgtttctcttgtgcagacacagagtcgtcagcagacttccggatacctgcatcagcaaattgctgtaccaggcgttccacggaggtctgtcgctctgcggccagcgttttaatcgttacatctgtcatgctgttccttcctgctacagtttattacgcttcgtcaccgaaccagcaaatattacgggcagccataatcagtgctccggctttttcgtcggtcaacccttcgatatcagccagatcatcaatgccctgttcggcgagatcttccagcgtacaaacgccacgggcggccagtttgaatgccaaatcacgatctaccccttcaaggttcagcagatcgtcagccggtttgttatcaccgaggctttcttcctgggcctgtgcaatggtggccagtgcatttttagcacgctcgcgcagtgcttcaacggtcggctcatcaaggccttcgatttccaacagctctttcatcggcacataggccaattcttccagcgtgctgaagccttcttctaccagaacagtcgcgaagtcttcgtcgatgtcgagatatttggtgaaggtgtcgatcgctgcgtgcgcttccgcctgatgcttagcctgcaggtcgtcaacggtcatcacgttgagttcccaaccgctcagctggctagccagacgcacgttctgaccgttacggccaatcgcctgcgccaggttaccggcttcaacggcgatatccatggtgtgtttatcttcatccaccacgatagaagcaacgtctgccggtgccattgcgttaatcacgaactgcgccgggttatcatcccacaggacgatatcgatacgctcgccacccagttcagtagacaccgcctgaacacgcgcgccacgcatacctacgcaagcacctaccggatcgatacgtttatcgttggttttcaccgcgattttcgcacgagaacccggatcgcgagccgctgctttaatttcaatcacttcttcgccgatttctggcacttcaatacggaacagttcgatcagcatttccggcttggaacgagtgacgaacagttgcgcgccacgcgcttccgggcgaacggaatagagcacgccacgaacgcggtcgccagggcggaagttttcacgcggcagcatatcttcgcgcaggatcacggcttcagcgttgttgcccagatccagagagatgttgtcgcggtttacttttttcaccacgccggtgatgatttcaccttcgtgttcacggaactgatcaaccaccatcgcacgttcggcttcacgcactttctgcacgataacctgttttgccgtctgggtagtgatacggtcaaaggtaacagactcaatctgatcttcaacgtaatcgcccaggttcaggctttcatcttcataacgtgcggcttcaagggtgatttccttggtcggctgggtgacttcatcaacaactaaccagcgacggaaagtgtcaaaatcaccgcttttgcgatcgatctgtacgcggacgtcgatctcttgttcatattttttctttgttgctgtcgccagcgcgctttccaatgcttcgaaaatcttctcgcgaggtagcgccttttcattggatacggcttcaactacagccaaaatttctttgttcatcgcgggcttttcacctcatccagactattaaaagtggggaaccaggttcgccttctggatattactcagcgcgaacacttcatctttaccttcgacggtaactgtgatcatttcaccgtctaccgctttgataacgccctgccatttacgacggttttgtaccgccatacggagaaccagagtcacctcttctccgacaaaacgggcgtagtgttcagccgtgaacagtgggcgatcgagacccggactggagacttccaggttataagcaacggtgatgggatcttcaacatccagcacagcacttacctggtggctcacatcagcacaatcatcaacattgatgccatcttcactatcaatatagatgcgcagtgtggatgtgcgaccgcgaataaattcgatgccaaccagttcaaaacccagggcctcaactggcgcagtaatcatctctgttaatttttgctctaatgtggacaagcccacccccaagacataaaaaaagggcctaaagcccagttattctgtagtcagataacaaaaaaccccgataaatcggggctttatataactgaaccctataaccgcaactgcggtctggagcactttccagaaggattttttcaaatcccactacgaaggccgaagtcttcacagtatatttgaaaaaggactctaagggaaagtggttgcgggggccggatttgaaccgacgatcttcgggttatgagcccgacgagctaccaggctgctccaccccgcgcctgaaacgtggcaaattctactcgttttgggtaaaaaatgcaaatactgctgggatttggtgtaccgagacgggacgtaaaatctgcaggcattatagtgatccacgccacattttgtcaacgtttattgctaatcatgtgaatgaatatccagttcactttcatttgttgaatacttttgccttctcctgctctcccttaagcgcattattttacaaaaaacacactaaactcttcctgtctccgataaaagatgattaaatgaaaactcatttattttgcataaaaattcagtgagagcggaaatccaggctcatcatcagttaattaagcagggtgttattttatgacgacgattctcaagcatctcccggtaggtcaacgtattggtatcgctttttctggcggtctggacaccagtgccgcactgctgtggatgcgacaaaagggagcggttccttatgcatatactgcaaacctgggccagccagacgaagaggattatgatgcgatccctcgtcgtgccatggaatacggcgcggagaacgcacgtctgatcgactgccgcaaacaactggtggccgaaggtattgccgctattcagtgtggcgcatttcataacaccaccggcggcctgacctatttcaacacgacgccgctgggccgcgccgtgactggtaccatgctggttgctgcgatgaaagaagatggcgtgaatatctggggtgacggtagcacctacaaaggaaacgatatcgaacgtttctatcgttatggtctgctgaccaatgctgaactgcagatttacaaaccgtggcttgatactgactttattgatgaactgggcggccgtcatgagatgtctgaatttatgattgcctgcggtttcgactacaaaatgtctgtcgaaaaagcctactccacagactccaacatgcttggtgcaacgcatgaagcgaaggatctggaatacctcaactccagcgtcaaaatcgtcaacccgattatgggcgtgaaattctgggatgagagcgtgaagatcccggcagaagaagtcacagtacgctttgaacaaggtcatccggtggcgctgaacggtaaaacctttagcgacgacgtagaaatgatgctggaagctaaccgcatcggcggtcgtcacggcctgggcatgagcgaccagattgaaaaccgtatcatcgaagcgaaaagccgtggtatttacgaagctccggggatggcactgctgcacattgcgtatgaacgcctgttgaccggtattcacaacgaagacaccattgagcagtatcacgcgcatggtcgtcagttgggccgtctgctgtaccaggggcgttggtttgactcccaggcgctgatgctgcgtgactctctgcaacgctgggttgccagccagatcactggtgaagttaccctggagctgcgccgtgggaacgattatagtatcctgaataccgtcagtgagaacctgacctacaagccagagcgtctgacgatggaaaaaggcgacagcgtgttcagcccagatgatcgtattggtcaattgaccatgcgtaacctggatatcactgatacccgcgagaaacttttcggttatgccaaaactggcctgctttcctcctctgccgctagtggcgtgccgcaggtggagaatctggaaaacaaaggccagtaattcgacatcaaccctgcccttcaggggtggggttaccttgcttatcctctgtaaactcctttctgagcatcacataatcgaaaacatcatggtttgcatccacaacccgactgtctcctttatagtgtgcaatcacttcctcaagcgtttgcggctgttccggctttgttacccccatccacgcattaataaggtaattattgtaagctgtgctaaagatgttgttttccgttgtgcgatccacgccatccccaagaacggggctataccagataaacatcgggacatgatatgcctgctggctagcctccctgcctccatgaaaatagacgttcttcttcgtagggtcacgttccaggccgtggtcggcaaaatacatgacgctggcgcggcgatcttttaataattcaaaaacctgacctagcaaactatctgtgtaatgaatggagttgtcatagcaggcatcctgatcgtcctgcggttgaaacacggcgctggattgcggataggcgctacaagccggttcatggcttccatttaaatgaagaacaatcagtttcttttgctgcgtattttgctgtaatgcttggcttaaatgcggcaacaacaattcatcaaatcctctgacataaactgtttccatggcgcgcatggcgatactggtaactgctgtaccattctgccgaaaagcggattggctgcttagccagaaagtctgaaatcctgcttgattagccatattaataatgttgtcggggtaattatgaatgtcatgactcaaaacagaatcagcagttaaagaaaggggaacgctcagcgcagtgtaaggtgcgccgcttattgcttgattaaacagtttgatctgttttctttgtgcttcaacttgcggtgtcgtagagcgtgtatatccatacaaagacatattgtcgacacgtacagactcccccacaatcaacacgtaggtatcaatacctgtatccctgacacttaattgaaaatacggcaccgtgtttgcaatactgagtaatctttgatgctctttcgctgctaaagcaaaatagttgagattgaaaaacggcgtataggtagcaaatcggctcgctagtatatatggactgaacgcttttttattttttgcatctttataagcaaattgacaagcggaaaataaactgccgctaatgacaatcagcaataatattcctgtcactttttttgtcggcaaggaaacatcatattttattattactgccaaaaaaagaagggataaaaaagcaaaggcacatagataagggatatacatccccagcattttgacaacttcatccggatcactctggagcacactaatcgcaaatccatcattgaaagttgtaccaaaggtacaccaactatagaggctaatactcatgtctgccgcagtcagtaacacaaatggtgcggcaacaagcaggcgaagcggaagggaacttatacgttttacaaccaggatggtcagaacgaagaacagcaagcgctgaaccatatgcgctccggaagaagcgactaagttcgtaataccaaaaacaataacacaaagatacaacaaccaatgagatttaaaagttctagcaaatttgttgaatactgtcatccagaaatccaagttcacaaccaatataaacaattatcaacaatgtttaattttatatcagacatgtttttcaactctgatccatatcagaacgaaacactgttagttttttctttttaaatgatgcggccattgcgttctcagtaattaaataacattatcaatgcgtctctaaacattacgcagaacgtagccatcagtcgttatactgacaggagcaggatggtttatcgagaagtaaacatatccgtattcgtaccggaactggagttgacacaataaagtgccaattatgtcagtagaagggaaaaatttataactaaggcgtaccggcaccatcgtttcaaggtaccagctacgagtaaagcaactggacgagatacagatacctgacaaccattcctcagaccaggaccaaaacgaaaaaagacgcttttcagcgtctcttttctggaatttggtaccgaggacgggacttgaacccgtaagccctattgggcactaccacctcaaggtagcgtgtctaccaattccaccacctcggcacggatactactttttagttcgggatatcgctggtcggcttagccggagcagctggctgagtttgttcggttttcgccggtgcactcagattttcccattcgctacctttattggttttgttgctattgatgttacccagcaccagactgatgatgaagaataacgttgccagcagcgccgtcatgcgggtcatgaagttaccagaaccactactaccaaacagcgtagcggaagcgcctgctccgaaggaggctcccatatcagcgcctttaccttgctgcagcatgatcagaccaacaaggccaattgccacaataaggaaaactactaaaagagcttcatacataatcaacctgttccttgcggagttgccgcgtaccaatgcttcaaccaataaagcgggagtttttaatcttccccactgaagcgggtgtgaatactaaccaaagcgaatgaccttcgcaagggcaattttatcgcattgtatcaactgcggaaaaaaacagcaaaaccgatgtgttcgctgagaaaaaaggcgacaatcgccgcctttttagccagttatctaacgctttaaacggcttttactgcatcggcgatgcggtgtgcaaattcagtcacctgcgcttcgtcttcgccttccaccatcacgcgaattaacggttcggtgccggatttacgcagcaacacgcgtccacggttgcccagcgcagcttcaacctctgcggtcacggctttaacactctcatgctcaagtggatcgccgctacctgcggtgtaacgtacgttaaccagaatctgcgggaacattttcatgccgctgcaaaggtcgtgcaggctcatatggttacgtgccatcgccgccagcacctgcaagccagcaacgatgccgtcaccggtagtagttttatccagcaggatcacatgaccggaattctctgcaccgatacgccagcctttctcctgcattttttccagtacgtagcggtcacccactttcgcgcgcgcaaatggaattcctaactgtttcagcgccagttcaagccccatgttgctcatcaatgtacccacagcgccaccacgcagctggccctgacgaagaccttcacgcgcgatgatatacatgatctgatcgccatcgactttattgccttcatggtcaaccataatcacgcgatcgccatcgccgtcgaaggcaataccgagatccgctttttcagccagcacacgagcctggagcgcgcgaacgtcggtagcccccacttcggcattgatgtttacaccgtttggctcacaaccgatagcgataacgttcgcccccagttcgcgcagcacgttcggcgcgatgtgataagtcgcaccgtttgcacaatccaccacaatcttcagttcactgaggctaagttcgttcgggaacgtggctttgcaaaactcgatatagcgacccgcggcatcaacgatacggctggctttacccagttctgcgctatcaacgcagctgatctccttttccatttccgcttcgatggcctcttctaccgcatccggcagtttggtgccgtcgatagagaagaatttaatgccattatcgtagaacgggttatggcttgcagatatcacaattccggcctctgcgcggaaggtacgcgtcagataagccacggccggtgttggcatcgggccagtgaagagtgcggaaaggcccgctgccgccagacccgcttccagtgcactctccagcatatagccagaaatacgcgtgtctttaccaataataatcttacgggagccgtggcgcgccagcactttacccgcggcccaacccagcttaagcacaaaatcaggtgtgatcggcgcatcccctacacgaccacgaatcccatcggtaccgaaatatttacgattactcatagcgtttgttttcctttgcagacagagtggcttccaccacccgcatcgcttctacggtttctttgacgtcatgaacacgaatgatgtgcgcgccttgcattgcggcaatgaccgcacaggccagactaccgctcaggcgctcggacggccccacgttcagcagctgcccaatcatgctttttcgactcatacccaccaacagcggcaggttgaaatggtgaaattcagccaggcgcgccagtaaactatagttatgggagagatttttaccgaaaccgaatccggggtcgagcaacaatttctcttttgcgatacccgcctgctcgcaacgtgctatttgctcaataaagtagcgattcacttctgcaaagacatcgtcatacttcggagcttcctgcatggtttttggatttccctgcatatgcatcagacaaaccggtaaaccggtttctgcagccgcctccagagcgccaggttcggaaagggagcggatatcattaataatgtgagcgccaactttcgcactctcacggatgacttctggtttggatgtatcgacactgatccagacttcgaagcgttgagcaattgcctcaaccacaggaataacacgttgcaactcttcttcaacgctaacttccgccgcccctgggcgcgtggactcgccaccaacgtcaatgatcgtcgcgccagcgttgatcatcagattcgcatgtttcaccgcatctatcaggctgttatgcgtgccaccatcgctaaaggaatcaggcgtgacgttgaggatccccattacgtgaggatggctaaggtccagactagtaccctgggcaaagagtttcatgatgttatccctggtatgaattgataagaaaaaaccccggagcacgccccggggttttcggtacaaatacagtcatctgatgcgggaacttacttgtcgcctaactgctcactcatggtgttacccgggttcggcgtacgcggttcatcaaccggacgaggagcctttggactaccattgtcgccagaattgttagaagcgcctggttcttcccagcccgctggcggacgtacatcgcgacgtgccatcaggtcatcaatctgcggtgcgtcgatagtctcatatttcatgagagcatctttcatcgcatgcagaatatccatattgtcggtcagaagctgacgcgcacgattatagttacgctcaatcagtgctttcacttcctggtcgatgatacgtgcagtttcatcggacatatgtttcgctttcgctacgctacggccgaggaacacttcaccttcttcttccgcgtacagcagtggacccaatttctcagagaagccccactgagtcaccatgttacgtgccaggttggtcgcaactttaatatcgttggacgcaccggtagatacatgttccggcccgtagatgatctcttctgccagacgaccaccgtacagcgtagaaatctggctttccagtttctgacggctggcgctgattgcgtcgccctcaggcaagaagaaagtcacacccagcgcacgaccgcgtgggataatcgtcactttgtgcaccggatcgtgttccggcaccaggcgaccgataatcgcatgacccgcttcgtggtaagccgtgctttctttctgcgcttccgtcatcaccatggagcgacgttccgcacccatcatgattttgtctttcgctttctcgaactcaaccatgctcacaacgcgtttgttgccacgagcagcgaacagtgccgcttcgttcaccaggttcgccaggtcagcaccggagaaaccaggagtaccacgggcaatgattgccgcgtcgatatcgggtgccaatggtacgcgacgcatgtgaactttcaggatctgctcacgaccgcgaacatctggcaagccgaccacaacctgacggtcgaaacggccaggacgcagcagggccgggtcgagaacgtccggacggttagtcgcggcgataacgatgataccttcgttaccttcgaagccatccatctcaaccagcatctggttcagagtctgttcacgttcatcgtgaccaccgcccagaccagcgccacgctggcggcctacggcgtcgatttcatcgataaagatgatgcacggtgccgctttcttcgcctgttcgaacatgtcacgaacacgggatgcacccacaccgacgaacatttctacgaagtcagaaccggagatagtaaagaacggaactttcgcttcgcctgcaatcgctttcgccagcagcgttttaccggtacccggaggaccgaccatcaagacgcctttcgggatcttaccgccgagtttctggaagcggctcggctcgcgcagatactcaaccagttcagcaacttcttcttttgcttcgtcgcagcccgcaacgtcagcaaaggtcgttttgatctgatcttccgtcagcatgcgcgctttgctcttaccaaagctcatggcacctttgccaccgccgccctgcatttgacgcatgaagaagatccagacaccaatcagcaacagcatcgggaaccaggagatgaagatagaagccagcaggcttggttcttcaggcggttcaccgacaaccttgacgttcttggtcaacaggttatccagtaatttcggatcctgaaccggaatgtaagtggtataacggttactatctttcttggtaacgttgatttcacgtccgttgatacgcgcttcacgaacctggtcgttattgacctcttgtaggaaggtagagtaatccaccttacggccattagactcgctgggcccaaagctctggaatacactcatcagcacaacggcaatgaccagccagagtattaggtttttcgccatgtcactcaagggattaacctcttattacaactgtgttaaaaacagcgtcaggatactctatatccagcatctttcaaactttcgtctgaaatctcccggttagggtttacgcccggtcgctacaatatacacttcccggctacgtgcacgagaagagtccagcttacgaactttgaccttcgtaaacagggagcgaatttcccttagatactcatcgaaaccttcgccctggaacaccttcactacaaaactgccacctggcgctaatacatcacgacacatttctagcgccagttccaccagatacatggcacgggggatatccaccgccggtgttccgctcatgtttggtgccatatcggacatgacaacctggactttgctgtcgccaacgcgctccagcagtgctttcatcaccagttcatcacgaaaatcgccctgaagaaagtccacaccaacgataggatccataggtaaaagatcgcaagcgatgatgcggcctttgccgccaatttgggtgaccacatattgactccaaccacccggagcagcaccaaggtcgacaaccgtcattcccggtttaaagagtttgtcactttgctgtatttcatcaagtttaaaccaggcacgggaacgtaacccctttttctgtgcctgttgaacatatttatcgctaaagtgttcctgaagccagcggctggagctggcagaacgcttcttacctgtcatttaactttcccatggggataactcatcgtaaccaattgcgtaaatttttacgcgcctatttggtgatatatgggagatggcggtagaatgacccgttttcaatcccaacgtaagcaaaaaatacgatgaatctgagtactaaacaaaaacagcacctgaaaggtctggcacatccgctcaagccagttgttctgcttggcagtaatggtttgaccgaaggggtgctggccgagattgaacaagcgttagagcaccatgaactcatcaaggtgaaaatcgccaccgaagatcgcgaaactaaaaccttgatcgtggaagctatcgtgcgcgaaaccggcgcctgtaatgtacaggtcatcggtaaaacgctggtgctttatcgcccaactaaagaacgtaaaatcagcctgccacgctaagattatcctaaagttacacacatttgctgtgtaaaacgaggggttttccgcaggcaggagagcaaaatgccacgctctgttcgttgataaaaggccgcatagcggcctttttcctttctttacaatacatcaacatcttgagtattgggtaattcttacaggtattccaccttaattacttcaaattctacttcgccgcccggcgttttgatgaccacaacatcatcttcttctttgccgatcaggccacgagcaatagggctgtttacagaaatcaggttttgtttaaagtcagcttcgtcatcgccaacgatgcgataagtctgttcttcgtcagaatccagattcagcaccgttacggtagcaccaaaaataacgcgcccattgttgggcattttggtgacatcaatcacctgcgcgttgctcagcttggcttcgatgtctttaatacggccttcgcagaaaccctgctgttcacgagctgcgtggtattcggcgttttctttcaggtcgccatgctcacgcgcttccgcgatagcagcaatgatttcaggacggcgcacagatttcagaaaatccagctcttcgcgtaatttttcagcgccgcgtaaggtcatcggaatagcttgcatttgttatacctcttgaatattcctgatagggcaagtcttcacccaccccggctgttcggcctgcccggcataactccttaccgggaccagaagcaaaaaaataccgacccgggtacaagtcccaggtcagctacaattcacattttgatagtcattttaccctgaagttcccgaagggtcatcgtttactttatagggcgttgcgccgtagtatgacggctcgattccaggttgttagcgcgagattatgcgattttccagatttatcatcggattgaccagctgtatagcgttcagtgttcaggccgcaaatgttgatgagtacattactcaactccccgctggtgccaaccttgccctgatggtgcaaaaagtcggcgcgagcgcccccgctattgattaccacagtcagcagatggcgctgcctgccagtacccagaaagtgattactgcgctggcggcgttgattcaactcggccccgattttcgttttaccacgacgcttgaaaccaaaggcaatgtggaaaacggcgtacttaagggtgacttagtggcgcgatttggtgccgatccgacgttaaaacgtcaggatattcgcaatatggtcgcgactttgaaaaaatctggcgtcaaccaaatcgatggcaatgtgttgatagatacctccattttcgccagccacgataaagcccccggctggccatggaatgacatgacacaatgctttagcgctccgcctgccgccgccatagttgaccgcaactgtttctccgtcagcctctacagtgccccaaagcctggtgatatggcttttatacgcgtggcatcttattaccccgttacgatgttcagccaggtacgcaccctcccccgtggttctgccgaagcgcaatactgcgaactggatgtggtgccaggcgacctgaaccgctttacgctgacgggatgcctgccacaacgttctgagccgctcccgttggcttttgccgtgcaggatggagccagctatgccggtgcaattctgaaagatgagttaaaacaggcgggtatcacctggagcggaacactgctgcgccagactcaggttaacgaacctggaacggtagttgccagtaaacagagcgccccgctgcacgatctgcttaagattatgctgaaaaagagcgacaacatgatcgccgatacggttttccgcatgataggccatgcgcgcttcaatgtgcctggaacatggcgggccgggagcgacgccgtgcgtcagatcctgcgccagcaagccggtgtcgatattggaaacaccattattgccgatggtagtgggcttagccggcataacctgattgcccccgccaccatgatgcaggtgctgcaatacattgcccaacacgacaatgaacttaactttatctccatgctgccgctggcgggctatgacggctctttgcagtaccgtgcaggtctgcatcaggcgggcgtggatggaaaagtcagtgcgaaaaccggtagcttgcagggggtatataacctggcgggattcattaccacagcgagcgggcaacgaatggcgtttgtgcaatatctttctggctatgcagtagaacctgcggatcagcgtaatcgccgtattccgttagtgcgttttgaaagccgtttgtataaagatatttatcagaacaattaatcaaaaagaaaccccggcacatggccggggcttcagattattgacaaagtgcgctttgtttatgccggatgcggcgtaaacgccttatccggcctacaaaatcgtgcaaattcaacatattgcaattctcttgtaggcctgataagcgtagcgcatcaggctgatttggcgtttatcatcagtgattaacgcttgtaaatgaactcaacgccttcttcgtcgtcttcgtcccagtcgtcatcccagtcttcatcatcctcttcagcaatctcttcaagctgctggcgatgataatcatcccacatgaattcgactttctctggctgtttcgcttcttcagcctgcacgaccgggttttcaatgataaaggtcatcacatcccagcagagatctttcacgcccagtccactcgccgcagagatcagataatatttatcttcccagcccagcgcctcagcgatcgctttcgctttctcttcggcttctaccttatccagcagatcgatcttgttgaacactaaccaacgcggtttcgtcgccagatcctggctgtatttttccagctcgctgataataatacgcgcgttttcaaccggatcggtgccgtcaatcggatcgatatcgatgaggtgcaacaggacgcggcaacgttccaggtgcttcaggaagcgaatgcccagacctgcgccttccgcagcgccttcaatcagtcctggaatatcggcaacaacgaagctcttttcgttgtccattcgtaccacacccagacttggcaccagagtggtaaacggataatccgccactttcggtttagccgcgcttaccgcacgaataaaggtgcttttacccgcgtttggcatccccaacataccgacgtcagccagcagcatcagctccagcagcagctcgcgcttatcgcccggcgtgccgttggttttctgccgcggtgtacggttaacggagcttttgaaacgggtattgcccagaccgtgccagccgcccttagcaaccagcagacgctgaccgtgtttggtcatatcgcccatggtttcaccagtaccctggtcgattacacgcgtacctaccggcactttaatcgtcacgtctttaccgcgcttaccggtacagtcgcggcttgcgccattctgaccgcgctctgcacggaaagatttttcaaaacgataatcgataagcgtgttcaggttctcgtcggcttccatccatacgtcaccaccatcaccgccgtcgccgccatccgggccgcctttcggaatatacttttcgcggcggaagctcacgcaaccattaccgccatcacctgcaacgaccagaatgcttgcttcatcaacaaacttcattttattctccgtaaatcattcgcctgcgcggggttggcttaccaccgttgtatgcttacgtaatccgccccaaatacgatgaccaatggcggaatacatcgcgcccgcaaccacgacaaacgcaccgagataacctaaaaggtttaacatcggtctggcgaagaaatcgggccaggccagacttaaaagatcactaaaaaacagcgtaaacagtggggtgagcgtgatgatcgcgctcacctgcgctgcctgccagcgagccatcgcttccgccagggcgccatatcctaccaaggtattcagtccgcaaaaaattaaacatgcgagctgccagtggctaagctgcgctatcactccaggctttgccagagggaagagcgcaattgtacataaagtgtacagtaaaaacaggatctgcggactggccagccgacgcaataaaaccttttgcgccacgccataactcacccaaaccgtcgccgcaccgaccccaaagataactccccaggtgtaatcggtgagctttgtaaatatctcgaccagactggtgttaaaaaacatcaccaggccgctcaggagcatcaatgcccctacaacctgagtgctgcgcattttctctttgaggataaatacgctggcaaccatcatgccaactgggctgagttgcccaatcacctggctagcggtcggactcaggtattgcaaggaactgctgaacaggatgaagttcccaaacagcccggcggtcgccactgccaacaaaatcaaccagcgtggcttacgaaacacgcgtaatggcggcaacctcttcttcaccgcaagaatggcacccaggccaatactcgccatcaagaaacggtaaaacacgattgtcggaggttccatcacctccagcacctgcttcattgcgattggcaacgccccccagcaaattgctgtggtgagcgccaaaagaatgccaatgcctgcctgctgcttcataccgtattccctgcaaagcgcatttgcggattaacgtcgcaccatgcgcatttttaccggttatcgaatgtaaaaagccccgcaacgtgttgcggggctttcatccgttaccgggacgcgaaaaacttattcagcttcgatgctgataaatttacggtttttcgggcctttaacttcgaatttcactttaccgtctgctttagcaaacagagtgtggtcacgaccgcaacctacgttagcgccagcgtggaatttggtaccacgttgacgaacgatgatgctacccgccagaacggattcgccaccgaaacgcttaacgcccaggcgtttagcttcactatcgcgaccgttacgtgtggagccgccagcctttttatgtgccatttgaaatctctcctcaggtcttaggcgctgatgccagtaattttcacatcagtgaaccactgacgatggccctgctgcttacgatagtgtttacgacgacgaaacttaacgattttaactttctcgccacgaccgtgagcaacaacttcagctttgattacgccgccatcaacgaaaggaacgccgattttgacttcttcaccgtttgcgatcatcagcacttcagcgaactcaacagtttcgccagttgcgatgtccagcttttccaggcgaacggtctgaccttcgcttactcggtgttgtttaccaccactttggaaaaccgcgtacatataaaactccgcttccgcgcacaccttttcaatgattcagagtgcgctataaatattcacaatagggcgcgaatattacgcaaaacgcacgcctttgacaagtgctacagtcaatacacgaagaaaaaaaacacaacttgtacggtaacgtttatctgtgccattttttcagtacaatcaccctatattcctaaccataaaccctaagttgcctttgttcacagtaaggtaatcggggcgaaaagcccggcttttgcgatgaatttagaaaaaatcaatgagttaaccgcgcaagatatggcgggtgttaatgcggcaatccttgagcagcttaattccgacgtccaactgatcaatcagttaggctattacatcgtcagcggcggcggtaaacgtattcgtccgatgattgctgtactggctgcacgagctgttggctatgagggaaatgcgcatgtcaccattgctgccctgatcgagtttatccacacggcgactctgctacacgacgacgttgtggatgaaagtgatatgcgcaggggtaaagctaccgccaacgccgcatttggcaatgccgccagcgtgctggtaggcgattttatttatacccgcgctttccagatgatgaccagcctcggtagcctcaaagtgctggaagtcatgagtgaagccgtaaacgtcatcgcagaaggtgaagttctgcaactgatgaacgttaacgatccggacatcactgaagaaaactacatgcgcgttatctatagcaaaaccgcgcgtctgtttgaggctgccgcgcagtgttccgggattctggctggctgtacgccggaggaggagaaaggcctgcaggattatgggcgctatctcggcactgctttccagttgatcgacgatttactcgattacaatgccgatggcgaacagttaggtaaaaatgtcggcgacgatctgaacgaaggtaaaccgacgctgccgctgctgcatgcgatgcatcatggcacaccagaacaggcacagatgatccgtaccgccatcgaacagggtaacggtcgccatcttctggaaccggttctggaagcaatgaacgcttgtggatctcttgaatggacgcgtcagcgtgccgaggaagaagcagacaaagccatcgcagcgttacaggtgctcccggacaccccttggcgagaagcactcatcggcctcgcgcacatcgctgttcaacgcgatcgttaatcccctcccctcatcccgcgcagcgcgcgggatggttccagtaagttccataaaaacacttattcagctctataacacctgaaaaatagggatgtgcatctttatatattctgaatattcacactctttacaggaactttttagagcaataggccatcaggagtatagtgatgctcgacagaagaagtgttctgaatgaaagcgactaacttaaggagtgaggaaaaatggaaagtaatttcattgactggcatcccgctgacatcattgcgggtttgcgcaagaagggaacgagtatggcggcggaatctcgcagaaatggtttgagttccagtacgctggcgaatgcattaagccgcccatggccgaaaggagagatgattattgcgaaagccctgggaactgacccctgggttatctggccaagtcgctaccatgatccgcagacccatgagtttatcgacagaacgcagttgatgcgtagctacactaaaccgaaaaaatgagtggtctggcggtagccccgcgaacggggctgccagctctcagacgattattcgcctttcacacgctcaatatttgcacctaaagcgcgcagtttgtcttcaatgcgttcgtagccacgatcgatgtgataaatacgatcaaccaccgtcgtcccttccgcaatacagccagccagcaccaggcttgcacttgcacgcagatcggttgccataacctgtgcgccagaaagtttttcaacaccgtgacaaataacggtattgctttcgatttcggcgtgcgcgcccatacggctcagctctggcacatgcataaagcggttttcaaagaccgtttcggtgataaacccggtcccttctgccaccaggttcaacagcgtgaactgggcctgcatatcggtcgggaatgccggatgcggcgcggtacgtacgttaacagccttcggacgtttgccatgcatatccaggctaatccagtcttcgccgacttcgatgtccgctccagcgtcacgcagtttcgccagcacggcgtcgagagtatctggctgcgcgttacggcagataattttgccgcgagaaatcgccgccgccaccaggaaagtaccggtttcgatacgatccggcagaacgcgatagacaccgccgcctaaacgttccacaccttcgatgacgatacgatcggtgccctgaccgctaattttcgcacccagcgtaatcaggaagttcgcggtatcgacgatttccggttcacgcgctgcgttttcaataatcgtggtgccttccgccagggttgcagcacacatgatggtcaccgttgcgccaacgctgactttatccatcacgatatgtgcacctttcaaacgaccatcgacggaagctttaacgtaaccttcttccagtttgatggtcgcgcctaattgttcgaggccagaaatgtgtagatcaaccggacgcgcaccgatcgtacaaccgccaggtagactaacttgcccctgaccaaagcgcgctaccagcggccccagcgcccagatagaagcacgcatggttttaaccagatcgtaaggtgcgcagaatacattaacgtcgcgggcatcaatatgcacagaaccattacgttctactttcgcacccagctggcttagcagcttcatacttgtatcgacgtctttcagtttcgggacgttctggatctctaccggttcttccgccagtagtgcggcaaaaaggataggcagagcagcatttttagcgccggaaattgtgacttcgccctggagcttcgttggcccctgaacacgaaatttatccatttagtttgttctcagttaacaattcatatccgctaccggcgaatcgcccatagctcaaaagccgttcagtttgcgatcgcgcgcccactccgcaggggtatacgctttgatgctcacagcatgaatgcggttatccgcaatatattccatcagcggaccatagaccgtctgctgttttttaacccgactcatgccgtcaaacaactcacccacggcaataacctgaaagtggctgccatcgccggaaacgtggacttcctggagggagagagcgttcatcaacacgctctgaatttcattattttccatgggatcttcaatcatcagttaataaaccagcgaaacatcttagagcaaagttgcgctggcataaataagcaaaaagcctcgctgataaatcagacaaggctcgacttgcaggcaggtttgccggacaggcggttaacgccatatccggcctgaaaaaatttaacgaggcagaacatcagcaggcaaattatacaatttcgccagggtatacactttgtcgtttaccccctgaagcgtcacattgttgccctgctttttcgccagatcgataagatggagcagcagtgccagtccccccgtatccacgcgggagacacggctaagatcgatgcaggtaatccccttcaccgcttcctcacgcatttcccaaagcggtagcaaaacgtcctgatccagctctccggataacgccagcgtgtcacccgtctgcatccagctcagactctcgctcattattttttctcttccagagtgattttctgttgagaaatgcttttcagttgcgcagtcaggccgtcgatacctttggtacgcagcagcgttccccactcgttttgtttggtggtgatcatactgacgccttcagcaatcatgtcgtaagcctgccaattgcccgtctgggagtttttacgccactggaagtccagacgcaccggcggacggccattcgggtcaataatggtaacgcgaataggcacaatggttttatcgcccagcggctgttctggcgcaatctgataggtttgaccgtgatacatcgccagcgcctgaccgtaagcctgcttcaggtactcacggaaagcggcaaagtaggcttcacgttgagcaggggtcgcactcttgtaatactggcccagcaccagcgcaccggcgtatttcacctgtacgtatggcagcagttcctgatcaacaatggtacgcagataatccgggttggcccgaatttgcggttgctcattcttcaggcgatcgaacgttttctgcgccgcctcgtccatcagcttatacggattggtctggtctgccgcggttgccgcactcagaggtgcaatcaccagcaaagcgaccatcattaaacgtttaaacatgcgtcggttctcctgaaattatttcgttgtacccacaggttcagtggtttcattattacctggcgcagcagctggcgcatcgccactattcttattgtcatcgcctttactaccgtaaaggaactgaccaatgagatcttccagcaccatcgcagacttagtgtcctgaattgtatcgccatccttcaggatagcagtccccagttccgggtcttcaaaaccgacgtttaatgccagatattgttcccccagcaggccggaagtacgaatgctcaggctactggtatctggaatgtggttataacgttgttcaatttccagcgttacgcgcggcagataggttttcgggtccagcgtaatatccgccacccgacccacaacaacgccaccaatactgaccggagagcgcgctttcaggccgccaatgttatcgaacgtcgcataaagcgtgtaggtcggttcagtacgtatggacgtcacgttcgccgccttcaggcaaacaaacagcgccgccagcagtgctgctaataaaaagatacccacccaaatttcattttttttcgtttgcatgaactcaattcccaaacatcaatgcggtcagcacaaaatccagccccagaacagccagagagctgtggacaacggtgcgagtggttgcccggctaatcccggcagacgtcgggatggcgtcgtagccgttaaacaagctaatccacgtcaccgtgatggcgaacaccacgctcttaatcagacagttgaccagatccatacgccagtcgacggcattttgcattgcgctccagaagaacccgctatcaatgcctttccaactgacgccgaccagagatccgccccagatccccacggcgacgaaaataaccgtcaacagtggtaaactaataaccccagcccagaaacggggagaaataacccgacgcagcggatccaccgccatcatctccatactggagagttgctctgtagcgcgcatcaggccgatttctgcggttagcgcgctaccagcacgcccggcaaacaacaacgcggcaaccaccggccccagttcacgcagtaggcttaacgccaccagcatacccagactggtttccgcactataagtggtcagaaccagataaccttgcagccccaacaccattccgatgaacacgccagaaaccacaataatcagcatgctcaggacgccgacattatagagctggcgcaccagcagcggcgcatgtttgcgaaattccggtttgccgaccagcgcattgaataacattaacccggcccgcccgaacgttctcagggttttaatccctttatgtccgaggctcgccagcgcatttaacagcatgagtggcttaactccctggtaaaagatcagcgtgataatcgccggcaggatagcggaacggaacaggcccgtcagctatcccgtccagaaactgacgtacgcgcggatcaggattcgcctgcaacgcctgggcactgccatgagcgacaatttttttgtccgccaggatccaggcgtgatccgcaatacttaacacttccggcacatcgtgagaaaccaccacacaagtcacgcccagcgcgctgttcagctcagaaatcagcttcaccagtacgcccatggtgatgggatcttgcccaacaaaaggttcatcaaacatgatgagatccggctccagcgcaatcgcacgcgccagcgctgcacgccgcgccatcccaccggaaagttcagaaggcattagtttagccgctccacgcagccccacggcctccagcttcatcatcaccgtactatgcaacaatggcgcgggaagttgggtatgttcgcgcagtggataggcgacgttgtcaaatacgttcatatcagtgaacaacgccccggactgaaataacatgctcatccgtttgcgcactgtatacaggcggctacgagacatcgccggaatattctcaccatcgaaaaggatctcaccatgatctggtgcgatttgcccgccaatcagacggagtagcgtcgttttaccgatgccgcttggccccatgatcgccgtgatcttccctcgcggcacggtcagggaaatattatcgaagatgcagcgattgccacgcgtaaaactgacatcgcgcatatcgactaaattcgccacagactgctccataattcacccttcgtcttgcgttgattttctaagcatggcgctcaatttaaccttgaacccaacatatttacagaatattacccgccgtggttagcgaaagctggcatttgttttactttttagccgcataaagtcaaaattaagcatccgttacggctttctgaaaatcttcagcggaccggcgagtatacctgaagaaaggacgttagatgcttttagctacggcactgttaattgttggtttacttttggtcgtttacagtgccgaccgcctggtttttgccgcgtctattctttgccgaacctttggcatcccgccgctgatcatcggcatgacggtggtcagtattggtacaagcttaccagaagtcatcgtcagccttgccgcgtctctgcacgaacaacgcgatttagccgttggtacagccctcggcagtaacattatcaatatattgctgatcctcggtctggctgcgctggttcgtccttttaccgtccattctgatgttctacgccgtgaattacccttaatgttgttggtcagcgtggtggccggttccgtactctatgacggacaacttagtcgcagcgatggtatctttctcctctttctggctgtgctatggctgctgttcattgttaaacttgcacgtcaggctgaacgtcaggggactgacagcctgaccagagagcagcttgcagagctgccgcgtgacggcggattgcccgtcgcgtttttatggctcggcattgcgcttatcatcatgccagtggccacgcggatggtggttgataacgccacggtgctggcgaattactttgccatcagcgagttgacgatgggtctgacggcaattgctatcggaaccagcctgccggaactggcaaccgcaatagcgggggttcgcaaaggtgaaaacgacattgctgtcggaaatatcattggcgcaaacatttttaatattgtcatcgtgttgggtttacccgcgctgataacgccaggagagattgatccactggcgtacagtcgtgactacagcgtgatgttgctggtgagcattatttttgcgttgctgtgctggcggcgctccccgcaaccgggccgtggtgtaggggtattattaactggcggatttatcgtatggctggcgatgttgtactggttaagcccaatactcgttgaataactggaaacgcattatgagccacgtagagttacaaccgggttttgactttcagcaagcaggtaaagaagtcctggcgattgaacgtgaatgcctggcggagcttgatcaatacatcaatcagaatttcacgcttgcctgtgaaaagatgttctggtgtaaagggaaagttgtcgtcatggggatgggaaaaagcgggcatattgggcgaaaaatggcggcaacgtttgccagcaccggtacacctagttttttcgtccatcctggtgaagccgcgcatggtgatttaggcatggttaccccacaggatgtggtgattgctatctctaactctggtgaatccagcgaaatcacggccttaattccagtgcttaagcgtcttcacgtaccgttaatctgcatcaccggtcgcccggagagcagcatggcgcgcgccgcagatgtgcatctgtgtgttaaagtagcgaaagaagcctgtccgttagggctggcaccgaccagcagcaccaccgccacgctggttatgggcgatgccctcgctgtcgcgctgttaaaagcacgcggctttactgctgaagattttgcgctcagtcacccaggcggcgcactgggtcgtaaacttctgctgcgcgtaaacgatattatgcatacgggcgatgagatcccgcatgttaagaaaacggccagtctgcgtgacgcgttgctggaagttacccgcaaaaatcttggtatgactgtcatttgcgatgacaatatgatgattgaaggcatctttaccgacggtgatttacgccgtgtcttcgatatgggcgtggatgttcgtcagttaagtattgccgatgtgatgacgccggggggaatacgtgtgcgccctggcattctggccgttgaggcactgaacttaatgcagtcccgccatatcacctccgtgatggttgccgatggcgaccatttactcggtgtgttacatatgcatgatttactgcgtgcaggcgtagtgtaaagattcaaggataaacaacaatgagcaaagcaggtgcgagccttgcgacctgttacggccctgtcagcgccgacgttatagcaaaagcagagaacattcgtctgctgatcctcgatgtcgatggcgtactgagtgatggcctgatttatatgggcaataatggcgaagagctgaaagcgttcaatgttcgtgacggttatggcattcgttgtgcgctcacctctgatattgaagtcgctatcattaccgggcgaaaggctaaactggtagaagatcgttgtgccacattggggatcactcacttgtatcaggggcagagtaacaaactgatcgcctttagcgatctgctggaaaaactggcgattgccccggaaaatgtggcttatgtcggcgatgatctcatcgactggccggtaatggaaaaagtgggtttaagcgtcgccgtggccgatgcgcatccactgttgatcccgcgcgccgattacgtgacgcgcattgctggcggtcgtggcgcagtgcgcgaagtttgcgacttattactcctggcgcagggcaaactggatgaagccaaagggcaaagcatatgagtaaagccagacgttgggttatcattgtgctaagtctggcggttctggtgatgatcggcattaatatggccgaaaaagacgataccgcccaggtggtcgtcaacaacaatgatcccacctataaaagcgagcatacggacacgctcgtctataacccagaaggggcactaagctatcgattgattgctcaacacgttgaatattattccgatcaggccgttagctggtttacgcagccggtacttaccacgtttgataaggataaaatcccgacatggtccgtaaaagcagataaagccaagctgaccaatgaccggatgctctatttatatggacacgttgaagtcaacgcacttgtgccagactctcaacttcgcagaatcacgacggataacgcgcagatcaatctggtgacgcaggatgttacctctgaagacctcgtcacgttatacggaacaacatttaactccagcggtctgaaaatgcgcggcaacttacgcagcaagaacgccgagctgattgaaaaggttagaacatcctatgaaattcaaaacaaacaaactcagccttaatcttgtgcttgccagcagtcttctggccgccagcattccggcatttgccgtaaccggagacactgatcagccgatccacattgaaagcgaccagcaatctcttgatatgcaaggcaacgtggttacctttaccggtaatgtcatcgtcacccagggcaccatcaaaattaatgccgacaaagtggtcgttacccgtccgggcggcgaacaaggtaaagaagtgattgacggctacggtaaaccggcaacgttctaccagatgcaggacaacggtaaacccgttgaaggtcacgcttcccagatgcactacgaactggcaaaagattttgtcgttctgacgggtaatgcttatctgcagcaggtcgatagcaacattaagggcgataagatcacttacctggtgaaagagcagaaaatgcaggctttcagcgacaaaggcaagcgcgtaacaaccgttctggtgccgagccagctgcaggacaaaaacaacaaaggccagaccccggcacagaagaagggtaattaattcgttatggcaacattaactgcaaagaaccttgcaaaagcctataaaggccgtcgcgtggtagaagacgtcagcctgaccgtcaactccggggaaattgtcggtctgctggggccaaacggtgccggtaagaccaccactttctacatggttgtaggcattgtgccgcgcgatgcgggcaacatcattattgatgatgacgatatcagtctgctgcctctgcatgcacgcgcgcgccgcggtatcggctatctgccacaggaagcctccattttccgtcgcctcagcgtttacgataacctgatggcggtactgcaaattcgtgacgacttgtctgctgaacaacgtgaagaccgcgcgaacgagctgatggaagagtttcacattgagcacctgcgtgacagcatggggcagagtctctccgggggtgaacgtcgccgtgtagaaattgcccgcgcactggctgcgaatccgaaatttattctgctcgacgaaccgtttgccggggttgacccgatcagcgttatcgacattaaacgcatcattgagcacctgcgcgacagcggcctgggcgtgctgatcactgaccacaacgtgcgtgaaacactggcggtttgtgaacgcgcttatatcgtcagtcaggggcatttgatcgcccacggcacgcctacagaaatcttacaagacgaacacgttaagcgtgtataccttggggaagacttcagactctgatagggtagaagtttgcgacgttttagcaggagagtacgattctgaacatgaagcaaggtttgcaactcaggcttagccaacaactggcgatgacgccacagctccaacaggcaattcgtctgttgcagttgagcacgctggaacttcagcaggagctacagcaggcgctggagagtaatccgctgcttgagcaaatcgacactcatgaagaaatcgacacccgcgaaacgcaagacagtgaaacgctggacaccgccgacgcgctcgaacaaaaagagatgccggaagagctgccgctcgatgccagttgggacaccatttacaccgctggtacaccatccggcaccagcggtgactacattgacgacgagctgccggtctaccagggcgaaacgacgcagaccttgcaggattacctgatgtggcaggttgagctgacaccgttttccgacactgaccgcgctattgctacctctatcgtcgatgccgttgatgaaaccggttatctgactgtcccgctggaagatattctcgaaagtataggcgatgaagagatcgacatcgacgaagttgaagccgtccttaagcggatccaacggtttgatccggtcggtgtggcggcaaaagatctgcgtgactgtctgctgatccaactctcccaattcgataagaccacgccgtggctggaagaggccagactgatcattagcgatcatctcgatctgttagccaatcacgacttccgcactttaatgcgcgtcacgcgtctgaaagaagatgtgctgaaagaagccgtcaatctgatccagagcctcgatccgcgccccgggcagagcatccagactggcgaacctgagtatgtcattccagatgtgctggtgcgtaagcataacggtcactggacggtagaactcaacagtgacagcattccgcgtctgcaaatcaaccagcactacgccagcatgtgcaataacgcgcgcaacgatggtgacagccagtttatccgcagcaatctgcaggatgccaaatggttgatcaagagtctggaaagccgtaacgatacgctactgcgcgtgagtcgctgtatcgttgaacagcagcaagccttctttgagcaaggtgaagaatatatgaaaccgatggtactggccgatatcgcccaggctgtcgaaatgcatgaaagcacgatatctcgcgtgaccacgcaaaaatacctgcatagtccacgaggcatttttgaactgaagtatttcttttccagtcacgtcaataccgagggcggcggcgaagcttcctccacggcgattcgtgcgctggtgaagaaattaatcgcggcggaaaacccagcgaaaccgttgagcgacagcaagttaacctctttgctgagcgaacaaggtatcatggtggcacgccgcactgttgcgaagtaccgagagtctttatccattccgccgagtaaccagcgtaaacaactcgtttgacccaaccgataaggaagacactatgcagctcaacattaccggaaataacgtcgagatcaccgaggcactgcgcgaatttgttacagccaaatttgccaaacttgagcaatattttgaccgaatcaaccaggtctatgttgttctgaaagtggagaaagtcacccacaccagtgatgcaacactgcatgtaaacggtggtgaaattcatgccagcgcggaaggtcaggacatgtacgctgccattgatggcttaattgataagctggcacgccagttgaccaaacataaagataaactgaaacaacactaattgtccgggcaattagcatgtgcatggcggtctgttgtgcggcacaacgggccatttgtacggttaatgctccgagcctgttccactgtttgagtgggcaggttcttaggtgaaattatgacaaataatgatacaactctacagcttagcagtgttcttaacagggaatgtacgcgaagccgcgtccactgtcagagcaaaaaacgcgccctggaaatcatcagcgagctggcggcgaaacaacttagcctgccgcctcaggtggtttttgaagctatcctgacgcgggaaaaaatgggcagtaccggtatcggcaatggtattgccattccgcatggcaaactggaagaagatactctgcgcgccgttggcgttttcgttcagctcgaaacgcctatagctttcgatgccatcgacaaccaaccggtggacttactttttgccctgctggtgccggcagaccaaactaaaacgcacctgcatactctgagcctggtggcgaaacgtctggcggacaaaaccatctgccgccgtttacgcgcagcccagagcgatgaagagctgtatcaaatcattacggataccgaaggtactccggatgaagcgtaattattcggtaatgtctcttttagacgttgtgaggagaaacagtacatggtactgatgatcgtcagcggacgtagtggtagtggtaaatctgtcgccctgcgtgcgctggaagatatgggtttttactgcgtggataaccttcccgtagtgttgttacccgatctggctcgaaccctggccgatcgcgagatttctgccgccgtcagcattgatgttcgtaatatgccggagagtccagaaatattcgaacaggcgatgagtaacctgcctgacgctttcagtccgcaactcctgttcctggatgccgaccgtaataccttaattcgtcgttacagtgacacgcgccgactgcatccgctttccagcaaaaacctgagcctggaaagtgctatcgacaaagaaagcgatttgctggagcctctgcgtagccgagcggatctgattgtcgataccagtgaaatgtccgttcacgagctggctgaaatgctgcgtacccgtctgctgggtaaacgtgaacgcgaactgaccatggtctttgagtctttcggcttcaaacacggtatccctatcgatgcagattacgtctttgacgtgcgcttcttgccgaacccgcactgggatccgaaactgcgtccaatgacaggtcttgataaacctgtcgccgcgttcctcgaccgccacacagaagtacacaattttatctaccagacgcgaagctatcttgagctatggttacctatgctggaaaccaacaaccgtagctacttgacggtcgccattggttgtaccggcgggaagcaccgtagcgtgtatattgcagagcaactggcagactacttccgcagccgcggtaaaaacgtccagagtcgccatcgtacgctggaaaaacgtaaaccatgaccgtcaagcaaactgttgaaatcacaaacaagctgggcatgcatgcccggcctgcaatgaagctgtttgaattaatgcagggttttgacgctgaagtgctcttacgtaatgacgaaggcaccgaggctgaagccaacagcgttattgcgctgctgatgttggattctgccaaaggacggcagattgaagttgaagcgaccggtccacaggaagaggaagcactggccgccgttatcgccctctttaattctggttttgatgaagattaatcttcatcactttgacatacaactcccttcaaactccccccgacaataagaaaatcacgtactgaaatcgttctcaatcaacgtcatttgtacattttgtgcgcttttcactttcagaagaaccttaagaaaaccttaagaggcattgtttaggttttgtttaagttaatcgaccatactggagatcgtcagaaaatatttccaggagatggcatgattcgcttatctgaacaaagtcccctgggcaccggaagacatcggaaatgttatgcgcatccggaagatgcccaacgctgtatcaagattgtctaccatcgtggcgatggtggcgataaagagatccgccgtgagttaaagtactacgcgcatcttggtcgccggttaaaagactggagtggaataccgcgctatcacggtaccgttgagacggattgcggaaccggttatgtctacgatgtgattgcagattttgacggcaagccttccattacgctgaccgaatttgctgaacaatgccgttacgaagaagacattgcacaactgcgccagctactgaaacagctgaagcgttatttgcaggataaccgtatcgtgacgatgagcctgaagccgcagaatatcctctgtcaccgcatcagtgagagtgaggttatcccggtcgtctgcgacaacattggtgaaagcacattgattccactggcgacctggagcaagtggtgttgtctgcgtaagcaagagcggttatggaaacgatttatcgcccaaccggcgctggctattgccctgcagaaagatctgcaacctcgtgagagcaaaacgctggccctcactagccgcgaagcttaatccagctggtgttgttgcataaacggctcaccgcctaactgatacatctgccgtaaaatccacgcctgacggctacgcacgtagccgcttgggctggagactttgaaacgaagtggattaggtaatacagctgccagtaatgcagcttcgctccgggtaagtttgctcgcgggtttgtggaaataacgttgtgccgcagcttcgacgccaaacacaccgtcgccaaattcggcgatattcaggtaaaccgtcaggatacgctttttgctccagaccgtttctatccccagcgttaatccggcttccagcccttttcgaacccagctacgcccatcccataaaaagagatttttggctgtctgttgagaaatcgtactagcaccgcgaatacggttttcattgcgctcgttgtgcgccagggctttctcaatggaagcgacatcaaagccccagtgctcaggaaatttctgatcttctgcggcaatcaccgccagtcccatccacgggctgatttgatccatactgacccagtcagaatgtgccacgtaacgaaaattgccatgcagccaggcgctgacctgtcgctcgaccattaccgcactgaagggaacaggcgcaacgctaaacaacgcgatgcccccgccccagaaaacggcgaggacaaccattaaccgcaaaagaaaacggcgaacgaaactaaacaccgttaagcggcttttactcattcagccagaaccagcacgcgggaaaccagcttatcaatgccgctcgccgcttctgcaatgttctgcgccagcatatatgctggggtggtgacaatcttattgtcttcatcaaccacgatatcatcgacaggacacggcacatgctccgcgcccatctcttccagcacttctgcggtatcgatatcagtaccgatggtcaaacgcagcgggaaatcgaaaattttcggcagcatcgccggggcaatacacataaaaccaagcggttttccggcctgatgcatcgcttgtgccagcgcctttaattcacggtcaacggtgcattcgctaccaagactggcaaaattgcttaaattcttcgccgcgccaaaccccccccggcacaatcaacgcatccagttcagcggcatcggcctgggccagaggacggatttcaccgcgcgttattcgtgccgcttcaatcagcacattgcgcgtttccgtcatcgcttcgccagttaaatggttgataacatcaacctgctgcttatccggtgcaaagcagaccgcctgcgcaccgctgcgactaatagctaacaacgtcaacaccgcttcatgaatttcagaaccgtcatagacgccgcatccgctcagaattacgccaattttcttcattgtgatcatcctttcgcaattgactgaaacacattaatttttttaataaaaatggtacgcatcacacatttaactgattcatgtaacaaatcatttaagttttgctatcttaactgcgtgcggcctgaaaaacagtgctgtgcccttgtaactcatcataataatttacggcgcagccaagatttccctggtgttggcgcagtattcgcgcaccccggtctagccggggtcattttttagtggcttttgccacccacgctttcagcacttctacgtcgtgacgccactcttctttcatctcttcaatccattcaccgacgttatcttcccaggccggaaggtcaggagactgaatttgctgacccagctgttgcagatggcgtaaccccacactccccgccgcacctttaattttatgtccttcctcaacaatgccttttttatcctgcgccgtcagattgctctccagcacgctgacatagcccggcatcatcttctcaaacaccgctaacccgtcggtgatcagcttcggtcctacaagttcgagatactgttccagcatgggaatatcgagcaatgcttcacttttactgttctcttctgtcgtcaccgtactctcctcatcatcctgggtatcccagaatttcttgatcatcgcggttagcgccggaacagaaagcggcttactcagcacatcatccattccagcattgaggtactcttgtttgtctttcagcacgttagcggttaaggccaccagcggcggtaaatcctcgcgcggataacgtttcgtcagttcacgagagatatccagcccggtcatatctggcaactgaatatccagcaacaccaggtcgtattcgcccggtttaaacatctccagcgccgccttgccggtcatggcgacatcaacgctgttacctaatttttccagcacagaacgcgcaacaatcacgttcagttcaatgtcttccaccagcagcacattcagcgccggtaaaggcatatcgtcttcatcaaacgcatcatcgacctcttctgctacgctcggtgcgtggatcgtcaacgtaaaggtactacctttgccctgttcgctggtaaccgtaatatcgccgcccatatttttcgccagacgacgagaaacggccagaccaataccggtgccggtggcaggtttaccgccatgactgtctttcacctggtaatacatggcgaaaattttatccagctcatcctgcggaatgccgataccagagtcttccacttcaaaatgcagcatatcgccttcatcgtagcgcacgcgcacggtaacctggccttgctgggtgaatttgacggcgttactgatgaggttccacaggatctgccgtaaacgcgtcccgtcggtaatgacctgatgcggtaatggcagcgtcggctccaggttaaagcgcaatcctttttgttgcgcctgcaatgcggagagattttccagatcggcaaggaagctggtgaaatcaaccggttgattatcaagctggaccttgcgccgttccatcttatccatgtcgataatatcgttaaagatattccccagcgtgacggcgctaacatggatggtcttgagatatttttcctgctcggcggtgagttcggtatccagcagaatgcggctcagaccgacgataccgttcagcggtgtacgcaattcgtgactgatggtggagataaacgtcgttttgtcgcggctggcccgttcaagcgcatcctgataccgcttacgctcggtaatgtcgcgaccaaagcccatcaaaccgtgacgtttacccacgcggtcgtagtacggcactttacggatttcaaagcaggctttgcgcccgtccgggtaatccagccactgttcataggtcagactcacattatgacggaacactttttcatcggtttcaatgacttttgcggcggcttccggactgtaaacatcagcaggtttcaggtgaaccagttgtttttcgctttttccggtcagcagctccatcgcgcggttacagccggaaaactctttatcttcgttacgataaaaaaccaggtcgggactagcatcaaggaaggaacgtaagaaactggattgctgctcgagctgaatttgtgtctcttcgcgctctttgatttcaattttcagttggccgaaggtttcctgcagttctgcttccgctttttcacgaacggcaatttcctgatttagctgggcaatattatcttttaactgaacgttgaggctcaaatcgcgctcgcgcatctcctccagtttttgcaccagccgactcagacgttgtcgactctcctccagttgctcgacgaccacgcttagaaagtagaccgcccacggcgtaatcagcaaaccaaagaagatagaacgaataacatcaatgctttcgacctgaccatgcagcaccatggttaccgccatttgtaccacaatggcaagaacgacgagggccagcgccagcaacatactgaagcgcaccagacctaacttcatcatcaggtcaacataatactgcgccagcagacgaatttgcttcattagggaattccttcacgacaacctgccccaataatacccaattctgacagttacgttataaattgtgtgagaaatgcggaattcccctcaacgacttactccgttggaggtagccacggacgtcccagcgcgcttccctgtacgccatgttcattcagatagcgatccagctcgaccattcccgtccatcgattttcgcaccacagcggagcaagcagcgtcgggcgacgggcgctggcggaaatgcggtggtagatcacttccggtggcgtatggcgaatcatttctccggcagtgagcgtgtaatcctccagttcaataccgttcaaacgccccgcttcccaggctttcgccataatgctgcctttcacaatatgcagcggatgcagctttatgccgtccacgccggtttcaaccactcgctccagcgtttgcaaacattcagcctgcccttcgccaggcaggccgacaattaagtgggaacacaccttcagcccgcgctgacgtgccagctgggttgtacgctgataacaggcaaaatcatggccgcggttgatgcgatgcagtgttttgtcgtgggcggtttgtagccccagctccagccacacttcgtaaccctggtccttatattcgcaaagcagatccagcaccgcatccggcacgcagtccgggcgggtacccacacacaaaccgacaatattggcctggctcaccgcctgctgatacatagaacgcagcacctgaacttccgcaaaggtgctggtatacgcctgaaagtaggccagatagcgtttagcgcggttaactaaattcgcctggtgcgccagttgctcggcaatggaacgatgctgctgcgcttcatcggcaaagctggcaacattacagaatgtgcagccaccacgcccgatggtaccgtcacggttagggcagctaaaaccgccgtgcagcgtcagcttatgcaccttttgcccataacgacgggtgagatcaccaccaaacatattgactaatttctgtaactgcataatctgatagaccgcgccttgaaaagaggccaaagcctgccatttttagctcaattcggcgatgacctggatcaatcgtcccggcctgcttttatcaactgcataatcaatcaaaattaccgaaatttcatgcataatcacataaatcacttttgcttatcttgtgtcagatttttttatctcctgatggattttaggcaaaaacagtagcatgaaacgtcattaccaattaaggcagtataaaatgctggttttgtcgtcagttcaaggcaggataagggttaacacacctttatgacagtcaggaattgactgtttctctaacgacttcccttttagccttaaagataaaatccattttaatttcagtcatttaataaagaattttgcgctaaagcacatttctgtaccaataagcttgccatttgacctgtatcagctttcccgataagttggaaatccgctggaagctttctggatgagcagcctgctcatcatatttatgcagtaattgagatcccctcttcaccgtattaaccgatgcgaaaaggacaacaagggggcgaatgcgaggcgcgcgtatgacacgcaaaccccgtcgccacgctctttctgtgcccgtgcgcagcggtagcgaagtggggttcccgcagagcctgggggaggttcacgatatgttgtacgataaatcccttgagagggataactgtggtttcggcctgatcgcccacatagaaggcgaacctagccacaaggtagtgcgtactgcaatacacgcactggcccgcatgcagcaccgtggcgcgattctcgccgatggtaaaaccggcgacggttgcggcttgctgttacaaaaaccggatcgcttttttcgcatcgttgcgcaggagcgcggctggcgtttagcaaaaaactacgctgtcgggatgctcttcctgaataaagatcctgaactcgccgctgccgcacgccgcatcgttgaagaagaactgcaacgcgaaaccttgagcattgtgggctggcgtgatgtccccactaacgaaggcgtgctgggtgaaatcgccctctcctctctgccacgcattgagcaaatttttgtgaacgccccggcaggctggcgtccacgcgatatggagcgccgtctgtttatcgcccgccgccgcattgaaaagcgtctcgaagccgacaaagacttctacgtctgtagcctgagcaatctggtgaacatctataaaggtctgtgtatgccgacggatctgccgcgcttttatctggatcttgcggacctgcgtctggaaagcgccatttgcctgttccaccagcgcttctccactaacaccgtaccgcgctggccgctggcgcaaccgttccgctatctggcgcataacggtgaaatcaacaccatcaccggtaaccgccaatgggcgcgtgcgcgtacttataaattccagacaccgcttatccctgacctgcacgacgccgcaccgttcgtcaacgaaaccggctctgactccagtagcatggataacatgctggaactgctgctggcaggcgggatggatatcatccgcgccatgcgtctattagtaccacccgcctggcagaacaacccggatatggacccggaactgcgtgccttctttgactttaactccatgcatatggagccgtgggatggcccggcgggcatcgtgatgtccgacggtcgttttgccgcctgtaacctcgaccgtaacggtctgcgtccggcgcgctacgtcatcaccaaagataagctcatcacctgcgcctctgaagtcggtatctgggattaccagcctgacgaagtggtcgaaaaaggccgcgtcgggccaggcgaactgatggttatcgacacccgcagtgggcgtattctgcacagcgcagaaaccgatgacgatctgaaaagccgccatccatataaagagtggatggagaaaaacgtccgccgactggtaccgtttgaagatctgcccgatgaagaagtgggtagccgcgaactggacgacgacacgcttgccagctaccagaaacagtttaactacagcgcggaagagctggactccgtaattcgcgtactgggcgaaaacggtcaggaagcggtcggtagcatgggcgatgataccccattcgccgtgctctccagtcagccgcgcattatttacgactacttccgccagcagtttgcccaggtgactaacccgccaatcgacccgctgcgtgaagcgcatgttatgagcctcgccaccagtatcggtcgtgaaatgaacgtcttttgcgaagcagagggccaggcgcaccgtttaagctttaaaagcccgattctgctctactccgatttcaaacagctcacgacgatgaaagaggagcactaccgcgcagatacgctggatatcacctttgacgtcactaaaaccacgctcgaagcgacagtcaaagagctgtgcgacaaagccgaaaaaatggtacgtagcggcaccgtgctgctggtgctctccgaccggaatatcgctaaagatcgcctgccggttccagccccgatggcggttggcgcgatccagacccgtctggtcgatcaaagcctgcgttgcgatgccaacatcatcgtcgaaaccgccagcgcccgcgatccgcaccacttcgccgtgttgctgggcttcggcgcgacggctatttatccataccttgcctatgaaacgctgggccgcctggtagacacccatgcgattgccaaagattatcgtaccgtgatgctcaactaccgtaacggcatcaacaaaggcttgtacaaaatcatgtccaaaatgggcatctccaccatcgcctcttaccgctgcagcaaactgtttgaagcggtcggtctacacgatgatgtagtgggcctgtgcttccagggggcggtcagccgcattggtggagcaagctttgaagacttccagcaggatctgctgaatctgagcaaacgtgcctggctggcgcgtaagcccatcagccagggcggtctgctgaaatacgtccacggcggcgaataccacgcctacaacccggacgtggtgcgcacgctgcaacaagcggtacaaagcggcgagtacagcgactatcaggaatacgcgaagctggttaatgagcgtccggcaaccacgctgcgcgatctgctggcaattacgccgggtgaaaacgcggtcaacattgctgatgttgaaccggcaagcgaactgtttaaacgctttgataccgccgcgatgtctatcggcgcgttaagcccggaagcccacgaggcgctggcggaagcgatgaacagcatcggcggtaatagcaactccggtgaaggcggcgaagacccggcgcgctacggcaccaacaaagtgagccgcatcaagcaggtggcttccggtcgctttggggttactccggcgtatctggtcaatgccgacgtcattcagattaaagtcgcccagggcgcgaagccaggcgaaggcggtcagttgccgggtgataaagtcacgccttacatcgccaaactgcgctatagcgtgcccggagtgacgctgatctccccgccgccgcaccacgatatctactctatcgaggacttagcgcagctcattttcgacctcaagcaggttaacccgaaagcgatgatctccgtgaagctggtttccgaaccgggagtaggcaccatcgcgactggcgtggcaaaagcttatgcggacttgatcaccatcgcaggctatgacggcggcaccggcgcaagtccgcttagtagcgtgaaatacgcaggctgtccgtgggagctggggcttgttgaaacccagcaggcgctggttgctaacggcttgcgtcacaagatccgtttgcaggtcgatggcggcctgaaaacgggtgtcgatatcatcaaggcggcgattctcggcgcagaaagcttcggcttcggcactggcccgatggtggcgctcggctgtaaatatctacgtatttgccatctgaacaactgcgcaacgggtgtagcaactcaggatgacaaactgcgtaagaaccactatcacggcctgccattcaaggtgacgaattactttgagtttatcgcccgtgaaacccgcgagctgatggcacagcttggcgtaacacgtctggtggatctgattggtcgcaccgacctgctgaaagagctggacggtttcaccgccaaacagcagaagctggcgctgagcaagctgctggagactgccgaaccgcatccaggtaaggcactctactgcaccgaaaacaacccgccgtttgataacggcctgctgaacgcgcagttactgcaacaggcgaaaccgtttgtcgatgagcgccagagcaaaaccttctggttcgatattcgcaacaccgaccgttctgtcggcgcgagccttagtggctatatcgcccagacgcacggcgatcaggggctggcagccgatcctatcaaagcgtacttcaacggcaccgcaggccagagcttcggcgtgtggaacgcgggcggcgtggaactgtacctgaccggtgatgccaacgactatgtcggtaaaggcatggcgggcggcttaatcgccattcgtcctccggttggttccgccttccgcagccatgaagcaagcattatcggcaacacctgcctgtatggcgcgaccggtggtcgtctgtatgccgcaggccgcgcgggtgaacgtttcggcgtgcgtaactccggtgctatcaccgtggtagaaggcattggcgacaacggttgtgaatatatgacgggtggtatcgtctgcattctgggtaaaaccggcgttaacttcggtgcgggcatgaccggcggtttcgcttacgttctcgatgaaagcggcgatttccgcaaacgcgttaacccggaactggtcgaggtcttaagcgttgacgctctggcgatccatgaagagcatctgcgtggtcttatcaccgagcatgtgcagcataccggctctcagcgcggtgaagagattctggcgaactggagtaccttcgccactaaatttgcgctggttaaaccgaagtccagtgatgtaaaagcactgctgggtcaccgtagtcgtagcgcagctgagttgcgcgtgcaggcgcagtaaggggtagcaacaatgagtcagaatgtttatcaatttatcgacctgcagcgcgttgatccgccaaagaaaccgctgaagatccgcaaaattgagtttgttgaaatttacgagccgttttccgaaggccaggccaaagcgcaggctgaccgctgcctgagctgcggcaacccatactgcgagtggaaatgcccggtacacaactacatcccgaactggctgaagctcgccaacgaggggcgtatttttgaagcggcggaactgagccaccagaccaacaccctgccggaagtttgcggacgagtctgcccgcaagaccgtctgtgcgaaggttcctgcactctgaacgatgagtttggcgcggtgaccatcggcaacattgagcgctatatcaacgataaagcgttcgagatgggctggcgtccggatatgtctggtgtgaaacagaccggtaaaaaagtggcgattatcggcgcaggcccggcaggtctggcgtgtgcggatgtcctgacgcgtaacggcgtaaaagccgttgtcttcgaccgtcatccagaaattggcgggctgctgaccttcggtattccggccttcaagctggaaaaagaggtaatgacgcgtcgccgtgaaatcttcaccggcatgggtattgaattcaaactcaataccgaagtgggccgcgacgtacagctggacgatctgctgagtgattacgatgccgtgttccttggcgtcgggacttatcagagtatgcgcggcgggctggaaaacgaagacgccgatggcgtgtacgcagcgctgccgttcctcatcgccaacaccaaacagttaatgggctttggtgaaacccgcgacgaaccgttcgtcagcatggaaggcaaacgcgtggtggtccttggcggtggcgacactgcgatggactgcgtgcgtacgtccgtgcgccagggagcgaagcacgttacctgtgcctatcgtcgtgatgaagagaacatgccgggttcccgccgcgaagtgaaaaacgcgcgggaagaaggcgtagagttcaaattcaacgtccagccgctgggtattgaagtgaacggtaacggcaaagtcagcggcgtaaaaatggtgcgtaccgaaatgggcgaaccggacgccaaaggccgtcgccgcgcggagatcgttgcaggttccgaacatatcgttccggcagatgcggtgatcatggcgtttggtttccgtccacacaacatggaatggctggcaaaacacagcgtcgagctggatagtcaaggccgcatcatcgccccggaaggcagcgacaacgccttccagaccagcaacccgaaaatctttgctggcggcgatatcgtccgtggttccgatctggtggtgaccgctattgccgaaggtcgtaaggcggcagacggtattatgaactggctggaagtttaagcgaggtaacaatgaattcgccagactgtgtctggcgaatcaaattactgacgaagtgcgcgttgttttctggcaaatgcggcatgagcgtttgacctttcctataatagggataattttcaataaattgtgctttgttcaccaagtctgatgagtgaagcacatcaagcaatttctcatttacaatccgtctcaattacttgttaacacctctgacaataccgattctgcaagctattcagtcttttcattccatgtaaattgtctcgatattaatatacaaaatatgaatataaaaaaccaatatattatccttaattatctatatattttcctatttttcagcgcaaacattcatgtaatgaataattatcaccacaaaccacctcaccagcaccttattattcacatgatcgtaactataaaattcattaaataaatacaccccagcaagttggctatttctgaacgagttatttatttacattcacaaacagatatatatactgcttcagctttttattttaaaaaataaatttgttattaaggatatgttcatatgtttttcaaaaagaacctcacaacagctgctatttgtgcagcactttctgttgcagcattcagtgccatggcaacagatagtactgatacagaattaactatcatcggcgagtatacccctggtgcatgtaccccagttgttacgggcggcggcattgttgactatgggaaacatcataacagtgcgctgaatccgaccggtaaaagtaataaactggttcaactgggccgcaaaaacagcacattaaatataacctgcacagcaccaacgctaattgctgtaacctccaaggataaccgtcagagcaccattgtagcgttaaacgacacatcctatattgaaaaagcttatgatactctcgtagatatgaagggaacgaaaaacgcctttggtttaggttctgcgcctaatggacaaaaaattggcgctgcatccattggtattgacaggtctaatggtgggattcacgcggcggacgatacaggtgaaattcctgtcgacctgattcaaactgaccactggagtgcagcgacccccacatggaaagccagttctaatggcgcattctgcagcctgacaagttgcagtgcaatcgagcgcggttattctgttgcaaaaacaggggaactgacacctgttgctattacagcggtcaccttcccgttactgattgatgctgcggtaaatgacaatactattcttggttctgatgaaacgatcaaactggatggtaacgtcactatcagcgttcagtatttataagaacttgtaatacagtttttatttttacgcattaaccagttagctataactcggacagattatgccctatgacatggtctgtcttaatcaatctcatcgcaaacagtgcataacatatattaacaatatgtttctgcgttatttatcattattacaggagttttaatttaaatgctcagacacattacattcactgtatttataacaacatcaatgaatactaacaatgccggacaggagtactatcaggcattcgttttatacgatcggttaatgtttcaggaaagctcttcgcatatcttggggaaagtaaatgtaatacgctgttcttaattgttcagtgctcaccccccagagtatagctcattccattattcaacttagctccatataaagggacagataatggaaagcctcagtgaaggaaccacagcaggctaccagcaaatccacgacggtattattcatctggtcgatagcgcccggacggaaacggtacgtagcgttaacgcgttaatgaccgcgacgtaccaggaaattggccgacgaattgtcgaatttgaacaaggtggcgaggccagggctgcgtatggtgcgcagctaatcaagcgactaagtaaggatttatgtctaaggtataagcgtgggttctctgcaaaaaacttacgccaaatgaggcttttttacctcttttttcaacatgttgaaattcaccagacaatgtctggcgaattaacaccattgggaattccgcagacaccgtctgcagaattcccaagcgcaaagatttggcagacgctgtctgccaaatctttccccttgcccaggtccacctacgtccgtttactttccgttaaaaacgctgacgcccgcagcttttatgaaaaagagacgctccgctgtggctggtctgttcgccagctagagcggcaaattgcgacccagttttatgagcggacactactgagtcatgacaaaagtgccatgctgcaacaacacgctcctgccgagacgcatattcttccgcaacaggcgatacgcgatccctttgtgctcgaatttctggaattgaaagatgaatatagtgaatccgattttgaggaggcgctgatcaaccacctgatggatttcatgctggaacttggggatgattttgcctttgttggtcggcagcgaaggttacgcattgatgacaactggtttcgtgtcgatctgctgtttttccaccgccgtttacgctgcctgctaatcgtcgatctaaaagtgggcaaattcagctatagcgatgccggacagatgaatatgtatctcaactacgccaaagagcactggacgctaccggatgaaaatccgcccatcggtctggttctctgtgcagagaaaggagccggagaagcgcattatgctctggcaggtttgcctaacaccgttctggcaagcgaatataagatgcaactacctgatgagaaacgactcgcagatgaactcgttcgaacacaggcggtgctagaggaaggctatagacgccgttaatttcagcggtttcgaattctgcagacagtgtctgcagaatctttaaaacgaactaagttttaagccattaaatcagccttaaccttcaccacaacctttttaatctctccaggctcgccgacaacgcatcctggtttatgcggttcacctggcataaacacggcgaacattcccggttttaagatgatggcttgctcgttatcaatggtgctgcaaagctgataatcatcctcatggtggaactcttcacactgacgcgcagtgcctgccatgccaaacagaatccgttcctcaccgtttaataacagctggatatcaatgtattgctcgtgcaattccgcttttttctcgacggggctttgagtgttaaacgtcatgacattcataaagatattgtcgccctgtaattcgtaacgacccggcgctttttcttgcggtctggcagctaatgccagcgttaacgcgtcctgtaacgcaggatgtaacccagcagacggtaaactctgtacttcacccatcatcataatttttctccctgggccaacagcgtagccccaagtaaacctgcatcatggcggtaatgcgccgccagtaaatcaacatgaaatgccgctggctcctgcgccagatacgtttccaccagcgccagatacccttctgccagaccaacgctgccaccgaccaccacgcactggcaatcagttgtggctttaatatcagcgatcagccttgcaagcgtacgtgcggagcggtgaatcagctgctgcgcctgctcgtcaccctgcccggcgcgcgtgaaaatagttttcgcatccgcgccagccaactccccctgcgctgccgctgcaatgccgcgaccagaagcaatcgcttccacgcaacctgtgcgtccacagccgcagactgggccgtgtggatcggcaagcgtatgcccgatatgccccgccagaccgccagggccggtaagcagtttgcagccgctcactacaccgccgccaacgccggtggaaacggtgataaagaccatatcggttatatcgccatccagcgcctgaaactccgcccatgctgcggcctgcgcgtcgttaatggcaatggtcggcaaattggtaagttgttccagcgttttgactaacggaaagtgtagcaatccaccaagattatgcggattaagtgccagcaagctgccgtcacggattatcccggtgctagcgatggcaacccgctgcgcatgagcttgcaacggagagactaatgcggataaggcatcacgcaaggcttctggtgtctggctggctggcgtaggaagttcacgacgatcgcggatctgcccgtcagcgccaatcagcgcggcggcaagtttagtaccgccgatatcaatcgccagtgtggtcatagcaccgcctttttcatcgctgtgttgtaccactgacaaatgtgctcaagacgcgtgattgcagaaccgaccgtcaccgcccacgcgccgtggcgcatcgcatccgccgcctgagcaggcgtgttgtaacgcccttcggcaatcacccgacatccggcgtcgctcaacgttttcaccagcgccagatccggctcttctggcgtttcaggcgtggtatagccagaaagcgtagtgccaataatttcggctcccagcttttggcatgccaggccgtcttccggcgtactgcagtcggtcatcgccagtaaaccgtgatggtgaatacgtgccagcagcgtttcaacaggcaccggacgcgggcggtcggtgccgtcaatggcgataatgtccgcgcccgcctgcgccagcgcatcaacatcttcaatataggccgtgatgcgtaccggagaatcctccagatcgcgtttcacaattccaataatcggcacgctcaccaccgcacgcgtggcttgcagatttgccacaccttcaatgcgaatggcaaccgcgcccgcctgttctgccgctaatgccatggcggcgacgatttcgggtttatcgagcgggctgtccggaaccggctggcaggagacaatcaggccaccgttagcagcgattttttgatccagttgtgcaagtaagctcatacatcttcccttagcgaaaggcccggtacatagaccgggcaacaggattaacttttggttttgactaaatcgtttttggcgctgccaaacggcacggcaccgctgaatggtttaccgtcgatagcgtcatgagtacgcaacgcttccgggcgcaaccaacgctgaacgcgagaaggcatatccagcccaatcagcaggatcaccacgaacgtcagactgaagctgaggcttgccagcgcagtacccagatccagacgttgagcgatcaacgcgccgatgattggggccagtgcaccgcccaatgcgccaacgttgtaggtaaagcccaggcccgctgcacgctggtcggtatcgaaataaccgccaatcagttttggtaagatcccggcgatcccttgtccaagcatttgctggaagaacagtaacagaccgagcacccagacgtttgcgccgccaatcgcaaataccggaataatcagcagctggctggccagcaggctacaaacgtacgctttgcgggttcccagccagtcaccgaggaagccacctacgcagcatcccaccgccgcgccaaagccactaaagaacagcacattggctacagtatgcgggttataagccagatcggttttcagatacgttggcagcagcgcctgaatcggccaactgtagaggaaagcaaacaacacgaccaccatcagcattacgcccgttggccagcgtttgcctgcactctgcaccataaagctgataaagattgcggcgcataacagcccaagaacagcgacgatcgcggcattttgcaggttaccggcgaagcagaaccacagcgcagtagccgccgccagtgtcattacgatattggcaatgcgatgttcaccacggtagagaatatccaccattgtgcgtactggtgctttacctgcgtgtttctctttccagtcttccgcttccgggatgtttttacgcagccagagagcaaagatgattggcaaaatgccgataaagaacagcgcacgccagccccagaccggaaccaccaggctatagacctgagcggcaacgacggcccccacagagaagccactaatcaaaaaaccactggctttgttacgcagatgttttggccagctttcaatgacataggtggcgctggaaccgtattcacccgccatccccatgccgatgaccagacgagcgataaacatggtgatgtagcctggcgcaaagccgcaggccagcgtcccggcgctgaagagaacgatgctggtgaccattgccagacgacgcccgtagcggtcacccatagcgccgagcatcaggccgccgaaccagcgagagataaaggctgcagagatcagacttgccgcctgcaccgtcgtcagcccgaattcaccttgtacttcggtgagtaccagggcgattaaaacgaaatcaaaaccgtcaagcagatatcccaaccaggcagcggaaaatgcgcgccattgtgcacggttgagatggcgataccacgggatattctgggttgtagtactcattgtgagtctcccgcggtgggcgatgcccacacgctttggtatgaaaattgtagggtacagatgcgtttatttcccctcacccggtaggggcgagcgaggggaaacaactcacccgcgctcttgcatcaactgctgggccagcgccttcagttctggcagatatttttcatctaccggtccaaacggtttgcggcacagcggcacagaaacgacatccatataatggaggacagttttcaggccgcggaatacgcccgttttgatcagtaaatcaatgactttattgcattcagtttgcagtttctgcgcggtctggatatcgccttctttcagcgccttaacgatcccctgatagcgccagcccatgatgttgtaggtactgccgataccaccatcagcgcccgccagcagaccagaggcgaagatttcgtcgtaaccgttatagagcacaagatcaggatgttcacgacggatctgctccatctgatagagatcgccagaggtctgtttcagcgcacctacgccaggcaatgtaacaagtgtgttgatctgatccagggtcagttttaccccactcagggctggaatgttgtacaccaccatcggcaaaccatccgcgctatcaataattgcccgatagtgatcgcagtgttcttcaaagctgaaaggatagtagaacggcgtgacggcggagacggcatcgaagccataacgtttagcgcttgccgcaagttgttggctttcggcggtgctgacgcaaccgacgtgggcgatgagtttaatcttacctttcgcctcttcggcgacgatttccagtacctgttcacgctcggaaaggctttgtacaaaggcctcgccggtgctaccacccacgtataaaccgtcgatgccctgctgaatattgaactgaaccaggcgacgcagactcgctttatccagtgcttgttgttggtcaaaaggagtcaggagtgcagccattacgccacgtaaattcgttgccataaatacctctgaagtgatgcttgtctgataaacgatatacctttatacctgttataccagatcaattaagcaacaccccatacagaaagcttataatgcgatctgcttcactaaagtggcattatttctttttgttggtggtctgaccgaaagcgtgccaggtagcagagacgctgttgagatggctttgcaacgcacgatcggcttcgtcaggatcatgacggcggatcgcatcaacgatcgcaatatgctgttgataactaacgttgttatgttcgtgcagtgcctgatcggtaaccgttgggcgtgcggcaataagccagtcgagcagggcaacgtggatcgccatgaagattgggttaccggggatctccgccagcacgcggtggaaatcaacgtcactacgaatgaatgccgcgttgttatccaggctctgactgttgatttccagtgcttttgccagcaaatcgatttgctcatcggtggcatgttcagccgcatagcgcaccagactggattcaaagaacagacgtaattgttcgaaatgggcaatcccaccgggatgagaaaggaaatctttcgccatgccggaaagctcaccgatgatagtgtccgcagaaggacggctgacgcgagcgcgttcgccgttgtttatttgcaccagacctttgcgttttaacgctgccagcgcttcacgcacgctaggacgcccgacgttaaagaacgccatcagttcgcgttcagacggtaattgttcaccttcgccaaattcacgacggcggatcatctgttccagctcttcttccaccatttcggagagttttttacgcgccagcgggcggctacgcaagttgcgaccaattgcaggactagaatcttcggtttggctatcaaatgcgttcataaggcccattctgtaaggtcagtgtgattaacatcatcagtgacatcctatcacaggattgaaagtaggggaaaatggcagggttttctctttgtgcctcatcattaccataattaacggaataattaactattgcgaaaaattaatgtaacgcagataaaaacatcccgtttgaattatttataagactattcacgagcattatgaatattatgaatgtgttcttacaaaataatcataagcgcatattttttaatgaaaaatcacctcacctacaattaaaaacacgacatccgcaccataaatagccttgcaaaaaatataacatcgttgttttcaatctgccgtttatgggattgaccgttttcttttgacacggagttcaacaatgttcggcataattatatctgtcatcgtattaattacgatgggctatttgatcctgaaaaactacaaacctcaggtggtgctggctgccgcaggtatcttcctgatgatgtgcggtgtctggttagggttcggtggtgtactcgatcccaccaaaagcagcggctacttgatcgtcgatatttataatgaaatcctgcgcatgctgtccaaccgcattgccggattggggctgagcattatggcggtgggcggttatgcccgctacatggagcgcataggggccagtcgcgcgatggtgagcttgttaagccgcccgttaaaactcattcgcagcccgtatattattctgagcgcaacttacgtcatcggccaaatcatggcgcagtttattaccagcgcctccggtctgggtatgttgctgatggtcaccttatttccgacgctggtgagtctgggagtaagtcgtctctctgcggtggcagttatcgcaaccacgatgtccattgagtgggggattctggaaacgaactccatttttgctgcccaggtagcgggaatgaaaattgccacatacttcttccactaccagcttccggtcgcctcttgcgtcattatcagcgtggcgatctcccactttttcgtgcaacgcgcttttgacaaaaaagataaaaatatcaatcacgaacaggcagagcaaaaagctctcgataatgtcccgccgctctattacgccattttacctgtgatgccgttaatcctgatgctcggcagcctgttcctcgcccacgtcgggctgatgcagagtgaactgcatctggtggtggtgatgttactgagtttgactgtgacgatgtttgttgagttcttccgcaagcataacttgcgcgaaacaatggacgatgtgcaggcgttttttgacggcatgggtacgcagtttgccaacgtggtaacgctggtggtcgcgggtgaaatatttgcgaaaggcttaacgacgattggcactgtcgatgcggttatcaggggggcggagcattctggtctgggcggtattggcgtgatgattattatggcgctggtcattgccatttgtgccattgtgatgggctctggcaatgcgccgtttatgagttttgccagtcttattccgaatatcgcagccggactacatgtaccagcggttgtaatgattatgccgatgcattttgccacgacgctagcgcgcgcggttagcccgattactgcggtggtggtcgttacgagtggaattgcaggcgttagcccttttgcggtggtgaagcggacagcgatccccatggcagtcggtttcgtggtgaatatgattgccacaatcacgctattttattaagtcattaaaaagacaaaacaggccgcctgggcctgttttgtattacttcacaacgcgtaatgccggtcgaccaccgcgtggtggctgcggaggttcatcgtcaggatgagtgtcatcatcgtgatctggcttgtcgccatcaataacgctcataacggtttcgttgtctgcgcttgcctcttcatcattcatgatgctggtatcttcatcgtaggcagcttcaggctcaaacatcgtgcctgcgccattttcacgggcgtagatagccagcacggcagccagcggcacagaaacctgacgcggaatgccaccaaagcgcgcgttaaagcgcacctcatcattcgccagttccagattgccgacagcacgcggcgcaatgttgagtacgatttgcccgtcacgcgcatattccataggaacctgcacgccagggagcgtcacatccaccaccaggtgcggcgtgagctggttatccagcaaccactcatagaatgcacgcagcagatagggacgacgtggtgttagctgactcaaatccatacagattaactccggcccagacgcatttcacgttctgcttcagttaaagaagcaaggaaagagtcacgctcaaagacgcgggtcatatagcctttcagctctttcgcacccgggccgctgaactcgatgcccagttgcggcagacgccacagcagcggagcaagatagcaatcgaccaggctgaactcatcgctcaggaagtacggcttctgaccgaagaccggcgcaatcgccagcagttcttcgcgcagttgcttacgtgcggcatctgcttcagaagcactaccgttgatgatggtgttcatcagcgtgtaccagtctttttcgatgcgatgcatgtacagacggctttcaccgcgagctaccgggtaaacaggcatcagtggcggatgcgggaaacgctcatccagatattccataatgatgcgagattcccacagggtcagctcacgatccaccagggtcggaacgctctgattcgggttgaggtcaatcagatcctgaggcggattgtccttttccacgtgttcgatctcgaaacttacacctttctcagccagcacaatgcggacctgatggctatagatgtcagtaggaccggaaaacagcgtcattacgctacgtttgttggcagcgacagccatgaaaacctccaggtatagtcagaatttttactgctaccagccaccaggtggccagtcagaagttgtgttacccaataaggaacgactctctttgttcgaaaatcaaacaaaaaatgagcaatacccgacatttgggcagaaaattggatgatagtttaccagattttgcgaccattgtggtgagtcgatgccggaaatggggaaaaagagatgcgctttagtctgaaatagttgacttagtcccttattggcgatgtggtttttgttttacctgtctgtcaggtggcagcaaaaagcaactttccagtttttacgctgattcagattttagctataaaaaaacccgccgaagcgggttttttcgaaaattgttttctgccggagcagaagccaattaacgtttggagaactgcggacgacgacgtgctttacgcagaccgactttcttacgttcaacctgacgagcgtcacgagtaacgaagccagctttacgcagttcagaacgcagggactcgtcgtattccatcagagcgcgggtgataccgtgacggatcgcaccagcctgaccagagataccaccacctttaacggtgatgtacaggtccagtttctcaaccatgtcgaccagttccagcggctgacgaactaccatgcgggcagtttcacgaccgaagtactgttccagagaacgttggttgattacgattttaccgttgcccggtttgatgaaaacgcgagctgcggaacttttgcggcgaccagtgccgtagtattgattttcagccattgcctataatcccgattagatgtcaagaacttgcggttgctgtgccgcgtggttgtgctcgttacccgcgtaaactttcagtttacggaacatagcacgacccagcgggccttttggcaacatgcctttaaccgcgatttcaatcacacgctcaggacggcgagcaatcatctcttcaaaggtcgcttgtttgataccaccgatgtggccggtgtggtgatagtacactttgtcagtacgcttgttgccggttacagcaactttgtcagcgttcagaacgatgatgtaatcaccggtatctacgtgcggagtgtattccgctttgtgcttaccgcgcaggcgacgagccagttcagtagccagacggcccagagttttaccggtcgcgtcaacaacataccagtcgcgttttacggtttctggtttagctgtaaaagttttcattaaaagcttacccaataaatagttacacgttggtgaacacccaaacgtcttcaattgttgaggttcacacgacaaagtccggcaaacctaccccttcgaatagcctatgccagcacacaaaaagttttgggaaaaaaactttcttgtaacgtggggtcgcaggattatagagaagtcggggtcaaagatcgacccctttttgtgatttgtgacaggttttaacccgccaaatgctcgcgcttcagatactcttcgctttgcatctcttgcagacgactcaggcaacgctggaactcaaacttcagccgatcgccctgataaatttcatacagcggcacttctgcactcaccactaatttgacatggcgctcgtaaaactcatccaccagcgcaataaagcgccgcgcttcgctctccatcaaccgcgtcataactggtacatcaaacaacatgaccgtatgaaagagacgactgagcgcaatatagtcatgctgactgcgggcgtcgacgcacagcgtagtaaaagagaccgccagcgtctggttctcgacgcccattgttgctaatggccgatggttgatttctaacgtcggactattttctcgtttcccccccgccagcgccaaccatagtttatccatttgcgcccgggtttcatcgtgaagtgggctaagccacagatgcgcctgagtgagtgtacgcagacgataatcaacaccagcgtccacgttcattacatcacaatgctgtttaatggcatcgattgcaggcagaaaacgcgcacgttgcaggccatttcgataaagttcatccggcggaatattactcgtcgctaccagggtaataccgcgagcgaacagggctttcatcagaccgccaagtagcatggcatcggtaatatcagaaacaaaaaattcgtcaaaacagagcacgtcagtttcggctttaaagcgatcggcaataatttccagcggatcggtctgcccctgtaaggcagttagctcttcatgcacccgcagcataaaacggtgaaagtgcaggcgctgtttccgctctcccggcaggctttgatagaaaaggtccatcagccaggttttcccgcgtcctacaccgccccacatatataagccacgcactggcgtatgctttgtgtcttcgcgtttaccccacagcttaccgacccgcgccattagcccactcgtcctgggggctggtggcgtgctattgatgagttcctgataaataatttccaggcggctgacggcctctttttgaacgtcgtcgggttgatggctgccttcattaagcgccttcaggtattggcttgttggggtaacgctttgcatgatcttattgttattccttgaataatcggtgcgccgttgttcacggttgacgaaaaaaaggccgttctacactacgcgatatgcagtcgggattccacttctgtggaattaacggttatagtggcataatcagccgcaggcatggagcctgaagccaacaccctacggaaacaaaagacaacgggagatgttcatgacctgggaatatgcgctaattgggttagtcgtcggcatcattattggtgctgtggccatgcgttttggtaatcgtaaactacgccagcaacaggcgttgcagtacgaactggaaaagaataaagctgaactggacgagtatcgcgaagagctggttagccactttgcccgcagcgcggaattactggataccatggcgcacgactatcgccagctgtatcagcacatggcaaaaagctccagcagcctgctgccggaactgtctgctgaagcaaacccgttccgtaatcgtctggcagagtctgaagccagcaacgatcaggcaccggtgcagatgcctcgcgactattctgaaggcgcatccggcctgctgcgtactggcgcgaagcgcgactaatttatttttcgggcgcagccattgcgccctcctcttctctccctccccgactatcatttaatctggtgtctcattgttagccgtctgaaaattcaataacatcaaactgttttgaatctcttttcttatcattcaggtacgagagcaggaataatgaaaaaacaaacccagctgttgagtgcattagcgttaagtgtcgggttaactctcagcgcgagttttcaggccgtcgcgagcattccaggccaggttgccgatcaggcccctctccccagtctggctccaatgctggaaaaagtgcttccggcagtggtgagcgtacgggtggaaggaacggccagtcagggacagaaaatcccggaagaattcaaaaagttttttggtgatgatttaccggatcaacctgcacaacccttcgaaggtttaggctccggtgtcatcatcaacgccagtaaaggctatgtgctgaccaacaaccatgtgattaatcaggcacagaaaatcagtattcagctcaatgatgggcgcgagtttgatgcaaaactgattggtagcgatgaccagagcgatatcgccctgttacaaattcaaaacccgagcaaattaacgcaaatcgctattgccgactccgataaattgcgcgtcggtgattttgccgtagcggtcggtaacccatttggccttgggcaaaccgccacctctggcattgtttccgcattaggccgcagcgggttgaatcttgaaggtctggaaaactttatccagacagatgcttccattaaccgcggtaactccggcggtgcactattaaaccttaacggtgagttaattggcatcaacactgcaatccttgcgcctggcggcgggagcgtcgggattggatttgccatccccagtaatatggcgcgaacactggcgcagcagcttatcgactttggtgaaatcaaacgcggtttgttaggcatcaaaggcaccgagatgagtgccgatatcgccaaagccttcaaccttgacgtgcagcgtggcgcgtttgtcagcgaagtgttgccaggttctggcagcgcaaaagcgggcgtcaaagcgggcgatattattaccagcctcaacggcaaaccgctgaatagctttgctgagttgcgctctcgtatcgcgaccaccgagccgggcacgaaagtgaagcttggcctgctgcgtaacggcaaaccactggaagtagaagtgacgctcgataccagcacctctagcagcgccagcgctgaaatgatcacgccagcgctggaaggtgcaacgttgagcgatggtcagctaaaagatggcggcaaaggtattaaaatcgatgaagttgtcaaaggaagcccagctgctcaggctggcttgcaaaaagacgatgtgatcattggcgtcaaccgcgatcgggtgaacagcattgctgaaatgcgtaaagtgctggcggcaaaaccggccatcatcgccctgcaaattgtacgcggcaatgaaagcatctatctgctgatgcgttaatgtcgtaaaccgggcatcaggcttacgtgtgatgtccggttaactcgtggtatgctgctgccgttcccttttttaatgacgcctccatcatgtttgtgaagctcttacgttccgttgcgattggattaattgtcggcgctattctgctggttgccatgcctagcctgcgcagccttaacccgctttccactccgcaatttgacagtaccgatgagacgcctgccagctataatctggcggttcgccgcgccgcgccagcggtggttaacgtttacaaccgtggtttgaacaccaactctcacaaccagcttgagatccgcaccctgggatccggtgtaatcatggatcaacgcggttatatcatcaccaataaacacgtcatcaacgacgccgatcagatcatcgtcgccttacaggatggacgtgtatttgaagcattgctggtgggatctgactctctaaccgatctggcggtacttaaaattaatgccactggcggtttacctaccattccaattaatgcacgtcgcgtaccgcacattggcgacgtagtactggcgatcggtaacccgtacaacctcgggcagaccattacccaggggattattagtgccacgggtcgaatcggtctgaacccgaccgggcggcaaaacttcctccaaaccgatgcttccattaaccacggtaactctggcggcgcgctggtgaacagcctgggcgaactgatgggcattaatacgctgagctttgataagagtaacgatggcgaaacgccggaaggtatcggctttgcgattcctttccagttagcaaccaaaattatggataagctgatccgcgatggtcgcgtgatccgcggctacattggtatcggcggacgtgagatcgcaccactgcacgcgcagggcggtggtatagatcaactgcaagggatcgtggttaatgaagtgagtcctgacggcccggcggcgaatgcgggtattcaggtcaacgatctgattattagcgtggataacaaaccggccatctctgctctggagacgatggatcaggtggcggaaattcgccctggtagcgtgatccctgtagtagtgatgcgtgatgataagcagttaacgctgcaggtcaccattcaggaatatccggcaaccaattaagtcgtgcgctcaaaacaaaaaaccggagtctgtgctccggttttttattatccgctaatcaattacttattaacgaactcttcgcccagggcgatatctttcttcagcgtatccagcataccttccagcgcgttctgttcaaatgcgctcagggtaccgatagatttacgctcttccacgccgtttttacccagcagcagcggttgagagaagaaacgggcgtactgaccgtcgccttcaacgtaggcacattcgacaacgccttgttcgccctgcagtgcacgaaccagagacagaccaaaacgtgcagctgcctggcccatagacagggttgcagacccgccaccggccttcgcttcaaccacttcagtacccgcgttctggatgcgtttggtcagatcagccacttcctgctcggtaaaactaacgccaggaacctgactcagcagcggcagaatggtaacaccagagtgaccgccaataaccggcacttcaacttcgcctggctgtttgcctttcagttccgcaacaaaggtgttggaacgaatgatatccagcgtggtaacgccgaacagtttgtttttgtcataaacaccggcttttttcagcacttcagcagcaattgcaactgtggtgttaaccgggttagtgataataccaatgcacgctttcgggcaggttttcgcaacttgctgtaccaggtttttcacgatgccggcgttaacgttaaacaggtcggaacgatccatacccggtttacgcgctacgcctgcagagataagaacgacatctgcgccttccagcgccggagtcgcatcttcaccagaaaaacctttgattttcacagcagtagggatatggctcagatcgacagccacaccgggagtcactggagcgatatcatacagagagagttcactaccactaggcagttgggtttttaacagtagtgcaagcgcctggccaataccgccagcagcgccgaggactgcgactttcatcctaaactccttattatattgataaactaagatatgttgctccgctgccgcgaccttaatccacaaaattgccgtttacaatgaccacatctcaagaatgtgtagtcacgcaagtttagcgtttatgcatttaattgccgtaatcaggaacctaacttacgtaattaacagtcgcttatgcattagcgcaacattccaacaggtggtgacaatataccctaccgttcagccaaaacaacatcaatttgataacaattaatttacttttaagcagaatttgcatgccgtgacgcaggcatgtttctcaataacgaaatttgataaaatcccgctctttcataacattatttcagccttcttcagggctgactgtttgcataaaaattcatctgtatgcacaataatgttgtatcaaccaccatatcgggtgacttatgcgaagcagcgctaagcaagaagaactagttaaagcatttaaagcattacttaaagaagagaaatttagctcccagggcgaaatcgtcgccgcgttgcaggagcaaggctttgacaatattaatcagtctaaagtcagccggatgttgaccaagtttggtgctgtacgtacacgcaatgccaaaatggaaatggtttactgcctgccagctgaactgggtgtaccaaccacctccagtccattgaagaatctggtgctggatatcgactacaacgatgcagttgtcgtgattcataccagccctggcgcggcgcagttaattgctcgcctgctggacagtctgggcaaagcagaaggtattctgggcaccatcgctggcgatgacaccatctttaccacccctgctaacggtttcacagtcaaagacctgtacgaagcgattttagagctgttcgaccaggagctttaatctctgccccgtcgtttctgacggcggggaaaatgttgcttatccctctcaaccccctgctttcccctgcgattaatttaacgaatagtgcgttttactgcgacatgtcattcacacaatgaatacataaggtaaaaaaagcacattatgcaaaattcattatctaattgaaaaaactagaattaacgataaataaccgtatttttaattcttttttgttattaaaattcacatttttaacacttagtatcaactgaaacagttagcgcggtattaattagctcaataattagtgtatacttgattttgtgatatgggtcacgaaacaaaggcccagctaaaagattatgtcgaggtaaaaatcatgaaaatcaaaaccactgttgctgcattaagcgtactttctgttctctctttcggtgcattcgctgccgactccattgatgctgcacaagcacaaaatcgtgaagcaatcgggaccgtatccgtaagtggtgtggcgtctagcccaatggatatgcgtgaaatgctgaacaaaaaagcggaagagaaaggcgcaacggcctaccagattactgaagctcgtagcggtgacacctggcacgctacggctgaactgtacaaataaaccctcatcgtcttgtccgacgatattgcccccggttcgggggcttttttttgcgttaatgacgaacattaaaacgcaaatgcccttccagctcttcctctgcctcatcaaacagcaatattaacgcgccaaaacggcgacgcgttttctctcccagatgaacaaattcaatctcaagtggtagcggcaggacatcgttcattaacacatcccatagactgtcgagatcgcgtaccttatctttcgccagaccaaaggtttggctaaagtcacgataaaaatcctcctgactctcaatctcatcaaaatcaaaggtataaatattcatctgttgccaccgtcacgtttcgcggcgagttctgccgtgcatcgctaagtatagccatgaaaaaaccgacgcttttggcgtcggttttgacttaactatcggtcaacgcatgttgatacttatggagcatccccgccagccgatttaccggttccgtcacctgcggtggcgcttgccagatgcgtagcttttcctggtagatttccagttcttccagcaactggccaaagtaccgacgacgtttatcatcgctacgggcagatatcacatggtctgctgtgcggcgcatttgtcggtgaaacgcgcttaaatcctcgttaaccgggatcggtgcatcacgcaggcgctggtgcgcgataatcatcgtcagcgccaggcgaaatttcggcaaatcccctgggaacttattcatcagcaaaaacagctgctgataaagtgccgggaggtggttctctttacgacgtgccacattggtagtcatcgcggaaacagcggcagaaacaaactgattaagcagtacacgtccggtcctgtcgcggcttttatcccgcaccagcaaaataacggtgaacgcgagcacacagccgacgatttgccctaatgcgctgtcgagaaactgactgaaatggaaagtcatcgggttatccagcacgataatatttatggtgctggccagtgcccccatgctgcccagtcgccgtttctgtacttctataccgaggaagaatcccagcactgccaggctaatgcacagcagcaacatgctctgttgggtattagggataatcaccaaaaagtagagcagccctaacggcagcgcggccagcgtcccgtagataaagtcgatcgccaccatgcgtggattcggcaaacgcattgccagactcgtcactaccgcaatcatcaccattgcaccactgccggaagtccagcccgtccacagccagaaaagcgtgcccagaatgcaggaaagtgtggttcgccagaagttacccattgcatgatgacgttcggcactctctacttttacttccggttcgccttgcaggatctcttcttcggtggcgttgatttttgtgttactgataacgccgcgcttgagaagctgataacgcgttgccgccgcgacccagctataaatggtgacaggcgtttcccgttccccggtccaggcgataactctccgcaggcgtttgagctgcttgtggacgtcctgcgcggtttctaccggcgtgtcaaaaaattcgcggaaagtatcagtgatcaattccgggcgcgtattctgaataagataagtttcgcaggattgggtaatcagcgtcaggcttagcgtattgatcgcttttaaacgtcgattggcccgcgcccagcgggaagattccatattcaggttgctgcgcatgccttgtagcgccgtggtgcgtcgcaccaggtcgccccaggctttatcgacaacttcaccatcgccatgcttgatacagagttgcattaattgatattgcgcgaccagcaaactttccagctctcgatccacttcttgtttgatgcttcgcggagaaaagagcaaatccgccataatcgcacacacaataccgataacgatctcgctacaacgttcgacggcaaactgcggcgtaagcaatggttccggctgaatggtgatcacaatgatcagcgcggtataaccggccagcccccacgcatagctgttttctattcgtaccaggctggatatccaggtacaaaaaccggcccagatacagcacaccagaatcatcaataatggtgcgcggatcatcgcaatgatgatcaccagtccggcaatacagccaataaatgtgccgatgatgcgcaaaaagccacgatagcgaatagcgccagaatacggttcacctcccgcagcaaaggccgtaccggcggcaacaatcgccgctgtcagtaccgcccagcgtggcgtttccagctggaagtgaaagccaacaaacagcgccagtacaatggcggtcgccagttttaccgcaaagcgaatatgttggttagcaatggagaaaatacccatcgtgattaaccaaactcacgcaggcgatgggccattttacggaagaagctatcctggctttcgtcgcgatcttgtttgccagtgaccaccactgtagcagtggtgcccgcaggccagatgttctcttgctggttgtcgagacgaatacgaaccggaacacgttgcgcaagacgcacccattcaaggttagagtctatagtcgccatccctttgtcgtcacgcgtgctgctggcgttggtgacccctgcggcaacactatcaacagtccctttcagcactttgttactgccaagcggcgtgatctctgcacgataccccggacgcaccccttccagcttagtttcttccatataggccagtacatagaaggagttctgtttcaccagcgcaaccgccgtacttcctcgagtaataaactcaccggtatagacgttgaggttggtcacccagccatctgctggcgcgcggatcaccgtgcgttcaagatccagttttgccagatcgcgggtcgcctgcgctttcgctaactgatgcagaaccgtttgtagtacgttgttggcctggtcgatctcttcgcgagacatcgcctgcacaccgagacggttacgacgtccggcctcctggcgtttctcctgtgccagtacctgataataagcaacatcggcttgcgcttcctcaagcgccttttgatagcgcggctggtcgatggtgaacagtatctgtccttttttcaccagctggttatcatgaacattcacctgggtaatgagtccagaaacgtccggcgcgatcgcaacgacgtcagcgctaaagcgcgcgtcacgcgtccagggggattcggtgtaatagacccaggcattaaaaattgcgatgaaggccagaatgactaatacgaccgtgatggccgtacgggagaattttcttattagtgttttcacttcaacctcaaacgaacagtcggcttatcaaataaaacaagcagcaatagagcgcggtgttgaacaacgccggatgccagacaaagtcgtagatacctgttggcacaagtacccggcgcaccagccagaaaatcgccagacttaaaagcaattcaaaaaatatcggtgggaaggacagcccaaacaccacgataacgggaaacagactcatgttgaccttggttgtaaagagagagcaggcgttattattttcagcatctgtcgccgcagagaagggcatggaaagccgggcgagagcaacattgctgtagattgatatttaatatattagcgtaactgttatgctgttatctatattatgtgatctaaatcacttttaagtcagagtgaataatggaacgactaaaacgcatgagcgtgtttgccaaagtagttgaatttggctcttttaccgccgccgccagacagctacagatgagcgttagctccatcagtcagacggtaagtaaactggaagatgagttgcaggtaaagctgttaaaccgtagcacacgcagcattggcctgaccgaagccggtagaatttactaccagggctgccgtcgtatgcttcatgaagtgcaggatgttcatgagcaactgtatgccttcaataacacccccatcgggacgctacgcattggctgttctagtactatggcacaaaatgttctcgccgggctgacagccaaaatgctgaaagaatacccaggtttgagcgtcaatctggttaccggaattccagcccccgacctgattgccgacggtctggatgtggtgatccgcgtcggcgcgttgcaggattccagcctgttttcccgccgtctgggcgcgatgccaatggtggtgtgcgccgcgaaaagctatctcacacaatacggcataccggaaaaacccgccgatttgagtagtcatagttggcttgaatacagcgtgcggcccgacaatgaatttgaactgatcgcaccggaagggatcagcactcgcctgatcccacaaggaagatttgtgactaatgatccgatgacgctggtgcgctggctgacggcgggtgccgggatcgcctacgtgccgctgatgtgggtgatcaacgagatcaatcgtggggagctggagatcctgctgccgcgttaccagagtgatccacgcccggtttatgcgttatataccgaaaaagataagctgccgctgaaggtacaggtcgtgatcaacagcctgacggattattttgttgaggtcggtaaattgtttcaggagatgcacgggcgcgggaaagagaagtaattcatattgtactgttacgttgtacaaacctgtgccaacgggttcccctcaccctaaccctcaccccaaaggggcgaggggaccgttcgtgcacgtagaaagattaattatccttctgaaaatagtgaaattattacgcagtaccgccaacagtcaggttatcgactttcaacgttggctggcccacgccaaccggcaaactttgcccttctttaccgcagacacccacgccgttatccagtttcaggtcgttgccaaccatgctaatctgctgcatggtttcgataccggaaccaatcaacgttgcgcctttcaccggcttcgttactttaccgttttcaatcagatatgcttcactagtggagaaaacgaatttgccggaggtgatatccacctgaccgccaccaaagttcggtgcatagataccgtactcaacggattcaataatttcctgcggggtgcttttacccggcagcatataggtgttggtcatacgcggcatgggcagatgggcgtaggattcacggcgaccgttgccagtcggcgtcatccccatcaaacgcgcgttgagtttatcctgcatgtagcctttcagaatgccgttctcaatcagcacgttgtactggcctggcgtaccttcgtcatcaatcgccacgctacctcggcgatcgaccatcgtgccatcatcaaccacggtacacagttcactagccaccagctccccgacctgtccactaaatacactagtgccacggcggttgaagtcgccttccagaccgtgaccaaccgcttcatgcaacagcacgcccggccaacctgcgccaagtactaccggcatggtgcccgctggtgcagcaacggcagaaagattgaccagcgccatacgcactgcttcttttgcccatgcatccgcacggacttcgccgtcgagatcggcaaggaagaattcataaccaaaacgaccgccgccgccactggcaccgcgttcgcgtttgccatcttcttcgacgagaacgctcacggaaagacgcaccagcggacggacatccgccgctagcgtgccgtcggtggccgcaaccaaaattaattcatagacaccactgaggctggcagtcacttcctgtacgcgcttgtccgcttcgcgggcaaccttatcgacgcgacgcaggatatccagcttctcttcacggctcatgctttgcagcggatctacgctggtatacaacgggctatgctctaccgcgcccagcgtctgtactttaccatcaccactatcacggacgatggtgcgcgccgcttgcgcactctgttccagcgccagcaggctgatttggtcagcgtaagcaaatccggttttttcaccgctgattgcacgcacaccaacgccctgatcgatgttgtaagaaccatctttaataatgcggtcttctaaaacccaggattcgtgatagctgctctgaaaatagagatcgccataatcaaggcgacgttcggccagttgaccgaggatcgcgaacaagtcctgatgtttcaggccgttcgccgctagcaattgttcacttaccaggttaagactcatcgtttttgctactcgttagttactgcagtagaggattttttacggctgccggatgcggcgtgaacgccctatccagcctacggttatgttccggtttgtaggcctgataagacgcacagcgtcgcatcaggcaacggctgtcggatgcggcgtaaacgccttatccgacctacggttatgttccgtttgtaggcctgataagacgcacagcgtcgcatcaggcaacggctgccggatgcggcgtaaacgccttatccgacctacggttatgttccgtttgtaggcctgataagacgcacagcgtcgcatcaggcaacggctgccggatgcggcgtgaacgccctatccgacctacggttatgttctggctcgttggcctttggcaacgattatcctatgagattggggcaattacgcgccctcgtcaaatcattgcgctttttctttacgcggttggcgcaacacttcgttgatttgcggatcgtccagcggaccgctaatgtgatagcgcaaaatggagactttgctccacagcggccccagcactttactggcggcaaacactgccgcgccaacaatggggttaaccgcaaaagccgcagccacgcccaccgtcgcagaaatctctggtgcgacaaccgcttccatattcaggtcgcgacgtaccagatttacgctccctttcatggcgatatccgcctccaggccatccaccagcgtgtcgtcggtgtgcataacgccgtctttaatccacgcggtgctgcgaatggagtcaaaatagaacccttcgccaaaagtgtctctgaaatcaaaacgcagcttacgcatcagggcatctacgctcaataagcgcagcaattgcccggcatgtccggtattgatttcggtaatttcgcctttacccagttgagtatgaatgatgccattcaacgtcgcttcatctggctgccagggtgctttgcgccagtgtaaatcgtaatccacattaaaactgctctggcgtatgggcgtcgtgacaccaaaaaattctgcggcggcatcaattttctgcccgcgcagttttcctttcaggctggtacgttcattccccggattattaacccattcaccatcggcagtaagccggctgaaaccagtatcaatcagtccattggtcagcgttaacgtatcgccagaaatggtgatatcactgtcaatgcgaccgaatttttgcccccagaaccagcactctgtgcatcgtatttgggcgtccggccagccacggaagttaatgcgctccgttgtcgggaaaggactactcggcgtactatcaccacgagttttcgccacgctcgggttgtaataaagatatttgatattcgccagccacggcgcgttattacgcatcgctagcgtggcgttgatttcacgcccttgcgcttcaaccagggtgccatttgccgtcggttggctaacaatactcaggttattccattgctgatttcccagactcaacataggcgtacgtaacgttatgtgttgtgggaaactcgctgcaccaccgacactctccgcagcgcctttctggaacagggccagccactcggcaccattcatcggcggcatattgagttcaacgccactttgttccggcaacggcgggagcgttttactgtctgccgcccaaatagcacgatcgagcgtcagcttttgaccgagcaaccagcggctattgaaatgattatccgcaccagcctgtccggttaattcaaagctgttgagattgccatcaaccttaacgtttaccgctagtggttcacccgcaggtttggctaacggactaggtaagtgactgctcacattctttagatcgccgttcagctctatgttataggtcgcaccagcatgataaggcagatcaatgcccactttaccatcccacgccacgctgccactcaatgcttcgttcaccgcttcaggcagaacgccggttttcgccggttgccagttaccgttgaggtttaccgctacctggtaggcttttgccccttctttggtggaaaaatccacgttcaacggctgattaaaccagcttgctgtcagtggttcactttgcagatcgctattgataaagctgaatttaccgctcaaatttttcagggtgctgtcgagtggtttgataaacagactgttattacgcagcgtcacttcacctttcgcggttaccagttcgccgttcagcgggatatcaagatgtaagcgagcattcacatcgccgtcgagctggagttcttgcagggtcgcacccagagaatctttcagcggtgtctcatcaaagtaagggccaacggctttacccggacctttaatgtcagcgtcaatcagcagtttttctttactgtagtcagggatcactgcggtaagattactcgcgcgcacgccgcccagattaacgccatcggttttcatccataaaccgtcgttaataaagtccagttcaatatcaaggttagttaatgcaggccagtccggctggaaggcaaacttcgcgttgcgcagcggcaccagcacttcaaactgaccttcgttgtgtttataggggaagagttgcggattgccaccataaaccagcgtcgcgttatccgcttcaccgccctgaatcgcgccacttaagtaatcaaccaggtctttacccatcaagttttccgggaaatagcgccaggcttgactaccatcatcggtactgatgccagccagaatacccagccagggttcatcgttagcaggttgcaggtaacgaaaaccgccgcgcgcatggacggctttggctttaacgtcaatattacgcccatccagctggaaacctttgttattgttcagccagcttatagttgcctggccgtcggcgatttctagtggcgcacggaataccgtttcgtaaggcatctttgcctgcttcatgctcgcggtaagcaaaccattttcaacgctgccggaaagcgtcccggagaagtgttccgcacccggtaataatttccattgcttccaggccagatcgctccagcttgcctgaaaacgggtcttgtctgccgcctgaagcgggatatccagcgccagagtgttaatcttgccgctcggttgtgtggagcgccaaacatcacccagtgcaggactaagtttcgcggccagcgggcgtatgccctccaggcctgccagctccagattactggcgcgaatccggagttcgtcactgcgtttattgtctttgccgccaacgtcctgttccggtatccaggccagcgtcaatgctccgctcggccagggtttgccgtccatcgtgatccgtgtatcgggaatagagaactgccagcccggattttcacgcgtaatatgcgcggtcagattatccacgctcagcgtatgcgtttgcttctcgcccaaccagctggcaccgccctgtttcagccagacgtcaccgccggttacatcgcctttgtcgatcgtcatccagccttcaagggagaactgtgccgtttccagcgcaatattgtcctgcatccatttaccgagccacggcttcaggtcgatgtcatccgcctggagccagacgcgaccattgcttaacaacccctcatcatcgcgcaaatccatgcgcacctgcatcacgccgtgctgtccggtaaggctggagaggcttaccaggccttccgcacggtgtcgacgtggatcgttcagccaggtgagttgtgggatcgccagctcggcgcgctgaccggatggcgtcaggaaactgacttcactgtcgcgaagatcgaaatggtcaaattgacgaagaaacagatcgctgatgtgactggcttccagactgtcatcactaccaccgctggtgataggagtgttggtgcgaaagcgcagctgccagaaagtgaggtcgcgaaactgccagcgcatatgtaacaggctctgccagacatccagcgccagagtaacgcgtttaacgctaaattcgccgccatcttttagttctgcacggatgtcgtgtgcttcaagcgtcgggccaaaattctgccagctggcactgagctgactggcttctaccggcatgccagtcgcggattctattttgttgaggatttccggacgccaggcgtcaagatgcggtaaagcaatacgcaggccgctaaccagcagggcagcgatcacaacgagcgcggctccagtaagcagtaaaatccccggcaatcgcctcacccgtcactccttgtctgctaaaaatgtgactcaaaaaccctttgccggatggcggcccagcatctgtttacatcattacgacgtcaaactgctcctggttatagagcggttcaatttgtactttaacctgtttgccaacgaaaatttccacttccgccaggctgtgactctcttcgcctttcaaggcttcagctactgccggagaagcatagaccaggaaacggtcggagtcgtaagcatggtggacacgaacaatctcgcgcatgatttcatagcataccgtttccacggttttcaccgttccgcgaccgtggcaggttgggcattcgttacacagtacgtgctcaatgctttcgcgggtgcgtttacgcgtcatctccaccagccccagcgcgctaaaaccattaacgctggttttcacccggtctttgctcaacgcctgctccaggctgtgcagcactcggcggcggtgatcttcattattcatatcgatgaaatcaataatgataatcccgcccagattacgcaaccgtaactggcgagcgatagcctgcgtcgcttcaatattggtattgaaaatggtgtcgtccagattgcgatgaccgacaaacgctccggtattgatgtccacggtggtcatcgcttcggtctggtcgataatgagataaccaccggatttcagttctactttgcgttccagcgctcgctggatttcgttttcgacatcaaagagatcgaaaatcggctggcgtcctgtgtaatgctccagcttgcttgtcatctcgggaatgtactcgctggtgaactcaagtaacgcttcgtaagtcaggcgactgtcaacgcgaatgcggtccagttcggcatcggcgaaatcacgcagaacacgctgcgccagcgccagttcgccgtacagctgataacgggtctgcgggcgttttttacgctccataactttggtccagacgcgtttcagataagcggcatcggaggccagttcagcctcgccaaccccttccgctgcggtacggatgataaacccgccctgctcgtcgcaatactctgcgaccacttttttcaggcgttcacgttcactttcgctttcaatacgttgggaaaccccaacgtgagaagcccctggcataaacaccagatagcgagaagggagcgtgatatcggtggtcaggcgcgcacctttagtgccaagcggatctttcaccacctgcaccatcagatcttgcccctgacgaaccagttcgctgatgtcgcgcaccgtgaattgcttttgttcttcacccgccacacattcggtgtgcggcatgatgtcggatgcatgaagaaacgcggctttatccagcccaatatctacaaaagccgcctgcatacccggaagtacacgacttacacgacccttgtagatattgcctactattccgcgtcgcgcctcacgttcaatatgaatttcctgcagaataccgccatcaatatacgccactcgcgtttcgctaggcgttacgtttactaacaattcagccgtcatgtttatcccttttctcacgcagtgcgttaaaattacttaataattcatacgtttcaaccagcggtaagccgactacggcgtgatagctgccatttatcttcctgacaaaacagccacccagcccctgaataccgtatgcacctgctttatctaacggttcatcgctggcgacatagcccgcgatgtcttcgtctgttaacgttctgaaagtcacatcggtgaccaccaggcaatcgagaatgtgctggctgtcggccaacgccactgctgtcatcacctgatgggtctgaccgcttaatttgcgcaacatctgcgccgcatgctctgcgtcgcgcggtttctccagcacttctccgttcaggataacgatagtatccgcacccagcaccgggagatccttcgccgtttgcgcgacacctgcccgtgctttctcgcgcgccagacgcacaacatactgctgcgcgctctcctgcggctgacgctgctcctcaatgcccgtaacaatacgttcaaaggtcacgccaagttgcgcaagtaactcctgacgacgcggagaaccggaagctaaatacagagaagtcatagaaacctttattgcactgcaaactgctgacggactttgcgcatcagcaagaaaatccacggccagagcaccccattgactacactactccagaacacttccggtctgaaagagacgttaatcactaaaaactctgcccagaaaacaataatatccaccaccaggctaagcaacatgacgaccagcgcctgctgccataatgcgaggttgcggaaaagctggtatttcagcgccaccaggtaagcaatgatgctcatcgccaatacgcgtacgccaagcgtgctgccgctgatcagatccagtatggcacccatcacaaaacctgtgcccacatttacgcgatgaggcaaggccaggatccaatacaacaagatgagtaacacccagtttggccggaaaacaatcaggttatccggccagggcatgatttgcagcaacagcgcaatgaggaaagagagccagattacccagcgtccctggctacgatagctcgccactattgccctcccggcgcacgttattgccctcccggcgcacgcgcaggcggttgagcaccactttgcggcggcgtagccctttgtggagagcgattagcagcaggctgtgtcggcgcagcaggcgcagtagctgcatttcctgtcgccggttgctgcggagtcggctgagcgatccccgttgccggttcaggtaactttggccccatcgcgtctgggctaggcaatacctgcggcatcatctgcatcagacgttcattagcaacacgatgcacctcttccggcgtcatcgggttagcgccgttacgatctgccccccacagcagcagcagataacgcaaacgttgcagccctgcagtcggacgcgcctgaatcacagtataagcgcgctgggtatcgagttttacggaagagacaaccgcgaccggatagccttccgggaaacgaccgcccagaccggaagtcaccagcacatcaccaacacgaatatccgtattcgccggcagatgctcaagctgcaaatcatccgtacaaccgttaccggctgcaattacgcggatatcgttgcgcagcacctggattggcagcgcgtgggtcgcatcacaaatcagcagcacgcgactggtcagtttagcgacggccaccacctgaccaacaacacctttgtcgctgatgaccggctggccttcataaacgccattaacgctacctttatcgataacaacttgatcgctataaggatcgttaaccgtggagataacctgagtcaccattttctgctcatcctgacgcagcggggaacccagcagctcgcgcagacgcgcgttctcctgtttgtattgtccaagcatcagcagttcactgtttttcagcaacagttcctgacgtaacgcccggttttcaagttctaattggtcacggctggccagcgtctggcttacgccatccagcaattcacgaggagcattggaaacaaagtagaaaggactgacggcggtatccatataagtacggatttgactgaacgtccccaggcggctgtcggcaataataatgccgagcgccaccagcaccgccagaataaggcgaatctgtaggctcgggccacggctaaaaattggcttcataagttatgcgtattctcgtatcagaccaggcagggtaaacagacacttcccctgcctgcatccgattactcttcgctgaacaggtcgccgccgtgcatgtcgatcatttccagcgctttgccgccaccgcgcgccacacaggtcagcgggtcttcagcaacaacgactggaatgccggtttcttccattaacaaacggtcaaggttacgcagcagtgcgccaccaccggtgagcaccatgccgcgctcggagatgtcggaagccagttccggcgggcactgttccagtgcaaccattaccgcgctcacaataccggtcagcggttcctgcagtgcttcgaggatttcattggagttcagggtaaaaccgcgtggaacaccttctgccaggttacggccacgaacttcgatttcacggacttcatcgcccggataagcgctaccgatttcgtgcttgatacgttctgcggtggcttcaccgatcagagaaccgtaattacgacgcacatagttgatgatagcttcgtcgaaacggtcaccaccaatgcgcacagaagaggagtaaaccacaccgttcaaggagataacagcaacttcagtggtaccaccaccgatatcaaccaccatagaaccggtcgcttcagaaaccggcaggccagcaccaattgcggcagccatcggttcttcaatcaggaagacttcacgggcaccagcgccctgcgcggattcacgaattgcgcggcgttcaacctgggtcgcgccaaccggcacacaaaccagaacgcgcgggcttggacgcataaagctgttgctgtgcacttgtttgatgaagtgctggagcattttttcagtcacgaagaagtcggcgataacgccgtctttcattgggcgaatggcagcaatattgcccggcgtacggcccagcatctgcttcgcgtcatgacctactgcagctacgcttttcggactaccggcacgatcctgacgaatggccaccacggaaggctcattcaatacgatgccttgtccttttacataaatgagggtattcgcagtacccaggtcaatggacaagtcattggaaaacatgccacgaaattttttcaacatactaagggataatcctgaaagctggggcggaaaagaaaatccgcttactttaccaaccacacgcagcagcgacaaggcgcaaaaatcatctgctacggtgaaaattagtgcagttcgtttcctttgttacaaatctctgcctgagtccagaaaggcttaatgcatcagcagcattcctcgcctgtttgcaaccgcgtaaggtcattcatctgcatatgtgctgcaacaatctggcgagcagacaagcacactcccatgagacgcagcgcgcattattctacgtgaaaacggattaaacggcaggttaaacgctgtatctttgactatattttttcacgttagtatcaagtggctgactggacgcgaaaaaatccccttgcccgcctgtaacaccgcgctgaatcagggtctgccactcgcttcggctacgcacgccggtggcgtaaacctgggtgctggtcccggagcaggcttccaccaggctttgaaccagcagctggttctccgttcgcttctcaatgtttctgaccagccccggatggagcttgagtaactcaacattaagttctttgatccaactggtacttaccagcgtcaaaccagcctggttgacggctacccgtacccctaaagcattcactaaacgaataacaggttgtaaacgactgatatgttgacctacatcggcctctgcaagttcaataattatgcgttttcgttgacttttttcacattgcattaacgtatcgcgcagccaacgctgaaaacgcgggcgaatcaggctctcaacggtaacctgaatcgccagattttcctctggccagtaacgcaatagtggaataagacggctgatttgcagacggtcatactcttcgcttaagccaaactgcaagaccatcggcatatgctccgcgctgctaacctcttcattaccatcgaagatgcggcacatgagttcgcgatgatgaacctgaccttcgcgagtaaccgccggtttttgataaaggcgcgggccgccgcgactgagcatttgctcgataagcgtacgccagcgaacattaccgcgtcctttttcaggcaagctgtcatcgtaaatagcccagctattgccgccctgcaatcccgcattacgcgtggcagactctgcatgttccattacctgctcggtatcctgaccactacgccaggcgcagataccaatgtggatcatatcgtcgcgatcgagcattttattgttcggcaaggtatcaacggctttgattaactgaccggcgatgctctctgcctcttttaacgtccggtgcggtaacagcgcagcaaaatcactgcggtggtaacgcgccagcagtgcgccagggtagcgcatcataaatgtgctcagcagattcgtcagagtgaagaactgttcttcaacctggctgtgcccccaggtatcgctcaacatattgaaatccggcagacgaatcatcatcacgatcccgtgggtacctactttctcctgatcttccagtaacgttgctaactgattatcgaaaaagagtcggttattgaggccggttttcacgtcctgggcggcataagagcggatcagcgtatcaagacggctgtgttgttcgcgtgcgttctgaatttcacgaagcagcgtatccagcgcactgctggttctgggcggccattcatagatggttcccaacacattagagccacgctcaccgtttaagatacgagtagcccgggtttccagcaattcttgcccggcaagttgccgttgtaaccagcgtaccgccaggaagagcataacaatgataaagccaatcgcccccgtgagcggcgcggtggtcatcaagctatggaaatagttgcccatcggatcctgataaaccagacgcaagctcatccccggatgctttatcaacggaacgctcagttcgcgaaacagatcgctggagccaactggacgataactaccatttctggccagggtataaacctgtttatcaccatggagcaggtctacacgaacgatatctgcgctcatcattaattcggtaatttgtggccttaatacgctgaagtcattgctcacaaggtgggtatcaatcgccgtcgccaccgcctgaacgcgatgactaaacttatactgaatggcgttgtagaaacttaggctacagcccagcaaagtcacaaaaattgttaacccggtgagcagcgtaacaaaggcgctaaatttcgtcgttaatctcatccttgtgttaactccgatagtgaggaagcgggcatactagcaaatcagatttatctcgcaatttattgcgcttcatcggctttgcttttccattagcgagtatagtcttcagaaattattttccaatccatcatgcacatgaggaccacttatgcaggcgttacttttagaacagcaggacggcaaaactctcgcaagtgtacagactctggacgaaagtcgcctgccggagggcgatgtcacggtcgatgttcactggagcagcctgaactataaagatgcgctggcgattaccggtaagggaaaaatcatccgtaattttccgatgattcctgggatcgattttgccggaactgtacgcaccagcgaagatccgcgttttcatgccggtcaggaggtgttactcactggctggggcgttggtgaaaaccactggggtgggctggcggagcaggcgcgagtgaaaggtgactggctggttgccatgccgcaagggctggacgcgcgtaaagcaatgattatcggtactgccggttttaccgccatgctgtgtgtgatggcgctggaagatgccggtgttcgcccgcaggacggggagattgtcgtgacgggtgccagtggtggcgtcggcagtaccgccgtggcgctgctgcataagttgggttatcaggtcgttgccgtttccggtcgcgaaagtacccatgaatatctgaaaagtttaggtgctagccgtgttctccctcgtgatgagtttgccgaatcccgtcctctggaaaaacaagtctgggctggggcaattgacaccgttggcgacaaagtgctggcaaaagtgctggcgcaaatgaattacggcggctgcgtggcggcctgtggtctggcgggtggttttactctgccaaccacggtcatgccatttattctgcgtaatgtccgtttgcaaggggtggatagtgtaatgacgccaccagaacgccgcgcacaagcctggcagcgactggtcgccgatttaccggaaagtttctatacccaggcggcaaaagagatatctctgagtgaggcaccgaactttgccgaggccatcattaataaccagatccagggtcgcacgctggtgaaggttaactaaccatttagcagggaataataagagagggaactcattttgaaatcattattcaatcggttaacgggaaaagcggttagccggacagctttcgtcgaacaccttggtcaggaagttatacaacatcatccaaactggaaagtcatgatttcgactgaccacaaattgatgcgcattgatactccactaaacagctattattgatacgcctccgtcgcctgttaggtttatgttgctttgcctgggcgacgctacgcttagccccttacttatttctggtaccatggggtgaataatctgattttgtttgactacaaattaatcactcgaacctatttaatgctgagcattgtcaatcggttaattttgcgtgctttagcattcacatctatccagacgatgcagtgaaaattgggtaatccccagcaaccgctgcgtaatgtcgtctatcttgtcgcgatcctggcatccctacattatttgtggtctgtgaagattatctcattgcagcccctcatcttcgcagggctggcttttcagcttttcaccttacgttataagaagttccgtcgatgatggcgctaatttcgtgaattgtgcggcttgttgcaaattacacggtgttgaaggttatttacatgttagctgttgattatcttccctgataagaccagtatttagctgccaattgctacgaaatcgttataatgtgcgacctcgtcctccctgacgcagtttttgcgctgcggaaaaggtgacattggcgcaacgaaggtatattttgttttttgccggaggatagcagcagatcgctgcacaatgtccgtcaagtctaacattgacactctggggcaaaatagaccggcgtcccggcctgctggaatttatcgctatgcatacagctgtcggggcatacgctttacagacggcggtgaaacgcctgtcacaatcacactaaacaaagagtacggaacccactcatggatattcgtaagattaaaaaactgatcgagctggttgaagaaagtggcatctccgaactggaaatttctgaaggcgaagagagtgtacgcattagccgtgcagctcctgccgcaagtttccctgtgatgcaacaagcttacgctgcaccaatgatgcagcagccagctcaatctaacgcagccgctccggcgaccgttccttccatggaagcgccagcagcagcggaaatcagtggtcacatcgtacgttccccgatggttggtactttctaccgcaccccaagcccggacgcaaaagcgttcatcgaagtgggtcagaaagtcaacgtgggcgataccctgtgcatcgttgaagccatgaaaatgatgaaccagatcgaagcggacaaatccggtaccgtgaaagcaattctggtcgaaagtggacaaccggtagaatttgacgagccgctggtcgtcatcgagtaacgaggcgaacatgctggataaaattgttattgccaaccgcggcgagattgcattgcgtattcttcgtgcctgtaaagaactgggcatcaagactgtcgctgtgcactccagcgcggatcgcgatctaaaacacgtattactggcagatgaaacggtctgtattggccctgctccgagtgtaaaaagttatctgaacatcccggcaatcatcagcgccgctgaaatcaccggcgcagtagcaatccatccgggttacggcttcctctccgagaacgccaactttgccgagcaggttgaacgctccggctttatcttcattggcccgaaagcagaaaccattcgcctgatgggcgacaaagtatccgcaatcgcggcgatgaaaaaagcgggcgtcccttgcgtaccgggttctgacggcccgctgggcgacgatatggataaaaaccgtgccattgctaaacgcattggttatccggtgattatcaaagcctccggcggcggcggcggtcgcggtatgcgcgtagtgcgcggcgacgctgaactggcacaatccatctccatgacccgtgcggaagcgaaagctgctttcagcaacgatatggtttacatggagaaatacctggaaaatcctcgccacgtcgagattcaggtactggctgacggtcagggcaacgctatctatctggcggaacgtgactgctccatgcaacgccgccaccagaaagtggtcgaagaagcgccagcaccgggcattaccccggaactgcgtcgctacatcggcgaacgttgcgctaaagcgtgtgttgatatcggctatcgcggtgcaggtactttcgagttcctgttcgaaaacggcgagttctatttcatcgaaatgaacacccgtattcaggtagaacacccggttacagaaatgatcaccggcgttgacctgatcaaagaacagctgcgtatcgctgccggtcaaccgctgagcatcaagcaagaagaagttcacgttcgcggccatgcggtggaatgtcgtatcaacgccgaagatccgaacaccttcctgccaagtccgggcaaaatcacccgtttccacgcacctggcggttttggcgtacgttgggagtctcatatctacgcgggctacaccgtaccgccgtactatgacagtatgatcggtaagctgatttgctacggtgaaaaccgtgacgtggcgattgcccgcatgaagaatgcgctgcaggagctgatcatcgacggtatcaaaaccaacgttgatctgcagatccgcatcatgaatgacgagaacttccagcatggtggcactaacatccactatctggagaaaaaactcggtcttcaggaaaaataagactgctaaagcgtcaaaaggccggattttccggccttttttattactggggatcgacaacccccataaggtacaatccccgctttcttcacccatcagggacaaaaaatggacactcgttttgttcaggcccataaagaggcgcgctgggcgctggggctgacccttttgtatctggcagtttggttagtagccgcttacttatctggcgttgcccccggttttaccggctttccgcgctggtttgagatggcctgcatcctgacgccgctgctgtttattggactgtgctgggcgatggtgaaatttatctatcgcgatatcccactggaggatgacgatgcagcttgaagtaattctaccgctggtcgcctatctggtggtggtgttcggtatcagcgtttatgcgatgcgtaaacggagcaccggcaccttccttaatgagtatttcctcggcagccgctctatgggcggtattgtgctggcgatgacgctcaccgcgacctatatcagtgccagtagctttatcggcgggccaggagctgcttataaatacgggctgggctgggtattgctggcgatgattcagcttcctgcagtctggcttagtctcggtattctcggcaagaagtttgcgattcttgcgcgccgctacaatgcagtgacgctgaacgatatgctgtttgcccgctaccagagtcgtcttctggtgtggctggcgagtttgagtttgctggttgcgttcgttggtgcgatgaccgtgcagtttatcggcggtgcgcgcctgctggaaaccgcggcgggtattccttatgaaaccgggctgctgatttttggtatcagcattgcgttatataccgcctttggtggctttcgcgccagcgtgctgaacgacaccatgcaagggcttgtgatgctgattggcaccgttgtgctgcttattggcgtagtacatgccgctggcggcttaagtaacgcagtacagaccttgcaaaccatcgatccgcaactggttacgccacaaggcgctgacgatattctgagccctgcctttatgacgagcttctgggtactggtgtgttttggcgtgattggcctgccgcatactgcggtgcgctgtatctcttataaagacagcaaagccgtacatcgggggatcatcatcggtacgattgtggtcgcaattctgatgttcggtatgcacctggccggagcgttaggtcgggcggtgatccccgatctcaccgtaccggacctggtgatcccaacgttaatggtaaaagtgctgccaccgtttgctgccgggatcttcctggctgcaccgatggctgcgatcatgagcacaattaacgcccaactgctgcaaagttccgctacgatcattaaagatctctatctgaatatccgtccggatcaaatgcaaaacgagacgcgtctgaagcggatgagcgcggtaattacgttagttctcggcgcgttgctgctgcttgccgcctggaagccgccagaaatgatcatctggctgaatttgttggccttcggtgggctggaagccgttttcctgtggccgctggtgctgggtctttactgggaacgcgccaacgccaaaggcgcgctaagtgcgatgatcgttggcggcgtgctgtatgccgtactcgcgacgctgaatattcagtacctgggcttccaccctatcgtgcccagcttactactaagtttgctggctttcctggtcggaaaccgtttcggtacatccgtcccgcaagctaccgttttgactactgataaataaagagttttgccatgccttggatccaactgaaactgaacaccaccggcgcgaacgcggaagatcttagcgatgcgctgatggaagcgggtgccgtttctatcacttttcaggatacccacgatacgccagtatttgaaccgctgccgggcgaaacgcgcctgtggggcgacaccgatgtgattggtctgttcgacgctgaaaccgatatgaacgacgtggtggcgattctggaaaaccatccgctgctcggcgcaggcttcgcgcataaaatcgaacaactagaagataaagactgggagcgcgaatggatggataatttccacccgatgcgctttggtgaacgactgtggatctgccctagctggcgtgatgtgccggacgaaaacgccgtcaacgtgatgttagatccagggctggcgtttggtacgggtacccatccaaccacctctctgtgcctgcaatggctcgacagcctcgatttaaccggtaaaacagtcatcgactttggctgtggttccggcattctggcgatcgcggcgctgaaactgggtgcagcaaaagccattggtattgatatcgatccgcaggcgattcaggccagccgcgataacgccgaacgtaatggcgtttctgaccgtctggaactctacttaccgaaagatcagccagaagaaatgaaagccgacgtggtggtcgctaacatccttgcaggcccattacgtgaactggcaccgttaatcagcgtcctgccggttagtggcggtttgctgggcctttccggtattctggcaagccaggcagagagcgtttgtgaagcttatgccgatagcttcgcactggacccggtcgtggaaaaagaagagtggtgccgtattaccggtcgtaagaattaaccttcgcatcgccgtagggtgacgcggggcgaagtgcgagcaagctcacaaaaggcacgtaaatttgccgattatttacgcaaatttgcgtgccaaaattttcattcataaagaaaaattgagaacttactcaaatttctttgagtgtaaattttagtcactattttctaatatgatgatttttatgagtaattatcgcaccacgctcattttaaatgcaattctttgatccatctcagaggattggtcaaagtttggcctttcatctcgtgcaaaaaatgcgtaatatacgccgccttgcagtcacagtatggtcatttcttaactcatgcgcatcggacaatatcagctcagaaatcgcctgatcgcagcgcccatggctggcattacagacagaccttttcggacgttgtgctacgagatgggagccggattgacagtatccgagatgatgtcttctaacccacaggtttgggaaagcgacaaatctcgtttacggatggtgcacattgatgaacccggtattcgcaccgtgcaaattgctggtagcgatccgaaagaaatggcagatgcagcacgtattaacgtggaaagcggtgcccagattattgatatcaatatgggttgcccggctaaaaaagtgaatcgcaagctcgcaggtagtgccctcttgcagtacccggatgtcgttaaaagcatccttaccgaggtcgtcaatgcagtggacgttcctgttaccctgaagattcgcaccggctgggcaccggaacaccgtaactgcgaagagattgcccaactggctgaagactgtggcattcaggctctgaccattcatggccgtacacgcgcctgtttgttcaatggagaagctgagtacgacagtattcgggcagttaagcagaaagtttccattccggttatcgcgaatggcgacattactgacccgcttaaagccagagctgtgctcgactatacaggggcggatgccctgatgataggccgcgcagctcagggaagaccctggatctttcgggaaatccagcattatctggacactggggagttgctgcccccgctgcctttggcagaggttaagcgcttgctttgcgcgcacgttcgggaactgcatgacttttatggtccggcaaaagggtaccgaattgcacgtaaacacgtttcctggtatctccaggaacacgctccaaatgaccagtttcggcgcacattcaacgccattgaggatgccagcgaacagctggaggcgttggaggcatacttcgaaaattttgcgtaaacagaaataaagagctgacagaactatgttcgaacaacgcgtaaattctgacgtactgaccgtttctaccgttaactctcaggatcaggtaacccaaaaacccctgcgtgacagcgttaaacaggcactgaagaactattttgctcaactgaatggtcaggatgtgaatgacctctatgagctggtactggctgaagtagaacagcccctgttggacatggtgatgcaatacacccgtggtaaccagacccgtgctgcgctgatgatgggcatcaaccgtggtacgctgcgtaaaaaattgaaaaaatacggcatgaactaattcaggttagctaaatgcttgattaaaaaggcgctactcggcatggggaagcgccttttttataggtgtcacaaagggagtgaccatgagaacaggatgtgaaccgacccggtttggtaatgaagctaagaccattattcacggtgatgcgcttgccgaacttaaaaagatccccgccgaaagtgtcgatctgatctttgccgacccaccatataacatcggtaaaaattttgatggtctgatcgaagcctggaaagaagatctgtttatcgactggctgtttgaagtgattgcagagtgccaccgcgttctgaaaaagcagggcagcatgtacatcatgaacagtacggaaaacatgccctttatcgatctccagtgccgcaagctttttaccatcaaaagtcgcatcgtctggagttatgacagttctggagtgcaggcgaaaaaacactacggctccatgtacgaacccatcctgatgatggtgaaagacgcaaagaactacacattcaacggtgatgctattctggtagaagccaaaaccggaagccagcgcgcgttgatcgattatcgcaaaaatcctccacagccttacaatcatcaaaaagtaccgggtaacgtttgggattttccgcgcgtgcgttatttgatggatgaatatgaaaaccacccgacgcaaaaaccggaagccttactgaaacgcattattctcgcctcttccaacccaggcgatatcgttctcgacccgtttgctggtagctttactaccggtgccgtagccatcgccagcggacgaaaattcattggtattgagatcaacagcgagtacatcaaaatggggcttcgacggctggatgtcgcgagccattactctgcggaagaactggcgaaagtgaaaaaaagaaagaccggcaacctgagtaaacgaagccggttaagcgaagttgaccccgatctcattacaaagtaaaggatgtgtaagcctggttttcagattattcatttcgtgtatatttcctgccagacttggttaaacatgcacaggctcaggtaatgattcgcaagtattggtggctcgtcgttttcgctgtcttcgtttttctgtttgatactttactgatgcagtggattgaactgctggcaacagaaacagacaaatgccgcaatatgaacagtgttaatccactaaaactggttaactgtgacgaactgaattttcaggacagaatgtgaatttacatgacacttaattcattcgtttgatgaattaatttcgttatgttttcatctggcatgaacattcttaatacgttatcgaccagagcgggggcttgtttataaagatcataacccgccatattcattaaccagttttgaacaattccgctgaaggcaccatcaataataatcatcacaacatctaaatcgaggttatttgctacacaaccttgttgctgacacgcctgcaatacttcgcggagagtctgcggattaaagcccatcttttcgcgtatcactccctcggccagcatctcatcattaaattcacatttgtgatataagattttcagcaacgcctgctggcggggaattttggcaatatattgcaagccgacaatcaatttttcacgcaattgttgaaacgggtcatgctctaatccagccgtcaagtgttcctggattaactcccgcaaactaggctgttgcaaccacatctcattaaacagttgagtcttgttttcgaagtgccagtagatagcgccacgcgtaacgttagcggcgtcggcaatgtcgttgagcgtcgtcttgcttacgccatgctgcgcaaactgggcgatggcagtttcaatcagttcttgccgggtcttcagagcttcggctttggttctttttgccatgattaattattcaggaaataaatatattcgacacagagtgagaaaatagcgaaggttaatctatcacctaatgtgtatttatacgagaggctaatattgagttgctataaatcgttaaataaataatatatattatttacctaagatacattcactacatcaatatatatttcaatttacgaggttttaattctgcctctttcaacccgcgtcaaaataaaacagtagaatattaatctttttttgtgtttatgtgccttgagatgcctgtattcataactattccttacatcgacgaatgataatttgtaggatagcgaactgtatttttctttctgcgagttaacgcgttgcctttttgggtaaataacgcgcttttggttttttgaggaatagtaatgacgaaacatgccaggtttttcctcctgccctcctttattctgatctccgcggctttaatcgccggttgtaacgataagggagaagagaaagctcacgtcggtgaaccgcaggttaccgttcatattgtaaaaacggccccgttagaagttaagactgaattaccaggccgcaccaatgcttatcgtatagccgaagttcgcccacaggttagcgggatcgtactgaatcgcaatttcactgaaggcagcgatgtgcaagcaggccagtccctgtaccagatcgatcccgcgacctatcaggcaaattatgacagcgcgaaaggcgaactggcgaaaagtgaagccgccgccgccatcgcgcatttgacggtaaaacgttacgttccgctcgtgggtacgaaatacatcagccagcaggagtacgaccaggccattgctgatgctcgtcaggccgatgccgccgtgattgccgcaaaagccacagtcgaaagcgctcgcatcaatcttgcttataccaaagtcactgcgccaattagcggacgtatcggcaaaagcactgtgaccgaaggcgctcttgtcactaatgggcaaacgactgaactggcgactgtccagcagctcgatcctatctacgttgatgtgacccaatccagcaacgattttatgaggctgaagcaatccgtagagcaaggaaatttgcataaggaaaacgccaccagcaacgtagagttggtcatggaaaacggtcaaacctatcccctgaaaggtacgctgcaattctccgatgtgaccgttgatgaaagcaccggctccataaccctacgtgctgtcttccctaacccgcaacatacgcttttgccgggtatgtttgtgcgtgcacggattgatgaaggcgtccaacctgacgccattcttatcccgcaacaaggcgttagccgcacaccgcgtggtgatgcaaccgtgctgattgttaacgataaaagtcaggttgaagcgcgccctgtcgttgccagtcaggcgattggcgataaatggttgattagtgaaggactgaaatctggcgatcaagtcattgtcagcggcctgcaaaaagcgcgtccgggagagcaggttaaagccactaccgatacccccgcagatactgcaagcaagtaaggtaatctgacatggcaaacttttttattcgacgaccgatatttgcatgggtgctggccattattctgatgatggcgggcgcactggcgatcctacaattgcccgtcgctcagtatccaacaattgcaccgcctgcggtttctgttagtgcaaactatccgggcgctgatgcgcagaccgtgcaggatacggtgacgcaggttatcgaacagaatatgaacggtatcgataacctgatgtatatgtcctccaccagcgattccgccggtagcgtgacaattacccttaccttccagtccgggaccgatcctgatatcgcgcaagtgcaggtgcagaacaaactccagctcgccacgccgttgctgccgcaggaggttcagcagcaggggatcagtgttgaaaagtccagtagcagctatttgatggtggcgggctttgtctctgataacccaggcaccacacaggacgatatcagcgactatgtggcctctaacgttaaagatacgcttagccgtctgaatggcgtcggtgacgtacagcttttcggcgcacagtatgcgatgcgtatctggctggatgccgatctgctaaacaaatataaactgacaccggttgatgtgattaaccagttgaaggtacagaacgatcagatcgctgccgaacagttgggcggaacgccagcgttaccagggcaacaattgaacgccagcattattgctcagacgcggtttaaaaatccggaagaattcggcaaagtgaccctgcgcgtaaacagtgacggcagcgtggtacgcctgaaagatgtcgcacgggttgaacttggcggtgaaaactataacgttatcgctcgtatcaacggaaaaccggcggcgggcctggggattaagctggcaaccggcgcgaatgctctcgataccgcgaaagccattaaggcaaaactggcggaattacagccattcttcccgcagggaatgaaggttctctacccttatgacaccacgccattcgtccagctttctattcacgaagtggtaaaaacgctgttcgaagccattatgctggtgttcctggtgatgtatctgttcttgcagaatatgcgagcaacgctgatccccgccattgcggtacccgtggtgttgttagggacgtttgccatcctcgccgcttttggttactccatcaacacactaacgatgttcgggatggtgcttgccatcgggctgctcgtcgatgatgcgatagtggtggtggagaacgtcgagcgcgtgatgatggaggataagctcccgccaaaagaagcgacggaaaaaagcatgagccaaattcagggcgcactggtgggtatcgcgatggtgctgagtgcggtatttattccgatggcattcttcggcggttctactggggcaatttatcgccagttctctatcaccatcgttagcgcaatggcgctttctgttctggtggcattgattcttacccctgcgttatgtgcaacgctgcttaaacccgtctctgctgagcatcacgaaaataagggcggtttcttcggttggtttaataccaccttcgatcatagcgttaaccactacaccaacagcgtcggcaaaatcctcggatccacaggacgatatttactgatctatgcgctgattgttgcaggaatggtggtgttgtttttacgtcttccgtcttccttcttacctgaagaggatcagggtgtctttctgaccatgattcagttacccgctggcgcgacgcaagagcggacgcaaaaagtgttggatcaagttacggattactatctgaagaacgagaaagcgaacgttgaaagtgtctttacggttaacggctttagcttcagcggccaggcacaaaacgccggtatggccttcgtcagtctgaaaccgtgggaagagcgtaatggtgacgaaaacagtgcggaagcggtaatccatcgtgccaaaatggaattgggcaagatccgcgacggttttgtcattccattcaatatgccagccattgttgaactgggcacggcaacgggtttcgactttgagttaattgatcaggctgggctgggtcacgatgccctaacccaggcccgtaaccagttgcttggtatggcggcgcaacatcctgccagcttagtcagcgtgcgccctaatggcctggaagacaccgcgcagtttaaactggaagttgaccaggaaaaggcgcaggcattaggtgttagtctttctgacatcaatcagaccattagtacggcgctgggtgggacttacgttaacgacttcatcgaccgtggccgcgtgaaaaagttgtatgttcaggcggatgccaaattccgtatgctgccagaagatgtcgataaactttatgtccgcagcgccaacggcgaaatggtgccattcagcgcctttaccactagtcattgggtgtatggctctccgcgactggaacgctacaacggtctgccgagtatggagattcagggggaagccgcgccaggaaccagttccggcgatgccatggcgttgatggaaaaccttgcgagtaaattacctgcgggcattggttatgactggacgggtatgagctatcaggaacgcttaagcggaaaccaggctcccgctctggtagcaatttcctttgtggttgttttcctgtgccttgctgcactctatgaaagctggagtattcctgtcagcgttatgttggtagtgccgttagggattgtcggcgtgctgctggcggcgacactctttaatcaaaaaaatgacgtctactttatggtgggcttgctaacgacaattggcttgagcgccaaaaacgctattttgatcgttgagttcgctaaagatctcatggagaaagagggtaaaggtgttgttgaagcgacactgatggcagtacgtatgcgtctgcgtcctatcctgatgacctctctcgcctttattctcggcgtattaccgctagctatcagtaacggtgccggcagtggcgcgcagaacgctgtgggtatcggggtaatgggaggaatggtctctgcaacgttgctggcaatcttcttcgtaccggtgttctttgtggtgatccgccgttgctttaaaggataaatcagaaacataaaggcgctttcgggtgcctttattatttccagtgaaacccataaaaattaataagatattcttctgctcactctttaaaagctttctatagttcccgctcccttcactatttttacaattcacataatttgtcattattcattccgcaagatttataacctccggtgataaaatggcattcagctcgttaataagagagttaacttattaagcgttagcgtttattactgaggtaacaccatgaaaagattaattcctgtggcattgctcaccgcattgctggcgggctgtgctcacgatagcccctgcgttccggtttatgacgatcagggtcgtctggttcacaccaatacctgtatgaaaggcacgactcaggataactgggaaacggctggggctattgccggcggggcagctgctgttgctggcctgacgatggggatcatcgctctaagcaaataactgaacagggcgcggagttccgcgctctttttaacgatacagtatctctccataagataaaatattgctatattctgctgggtaattccctgctgatttagcatgttacatcgcgttatttcgctgctttcgaaataacgcatcaatttaattttcacacttcccaccagaaatatactcacgctaacaatcattattctgcttagtaaaacacgcgtaaatattttgcgccaaaatgtggcgcatgtttcattttcgcaccattgcggggcgctgtttttattatttcctgtctacactcagcttattgcgacgcgaaatcgtgcgcaaaagctggcactacttttgcttataagaggatggccacagacaggtaaaagacgtttcccaaacgtcctataacgataattttcgcctcacaggaagcattatgaaaaagatgatgatagccacactggctgccgccagcgtgctgcttgccgttgcaaatcaggcgctgctggcgcgacgcttgatgccgttcagaaaaaaggttttgtgcaatgcgggatcagtgatggattacctgggttctcttatgccgatgctgacggtaagtttagtggtattgatgttgatatttgtcgtggtgttgccgctgctgtatttggtgacgacacgaaagtgaaatataccccgctcactgcaaaagaacgcttcaccgctttacagagtggggaggtggatttgctctcccgtaatacgacctggactagttctcgcgatgccgggatgggaatggcatttaccggcgtcacttattacgacggcattggcttcctgacgcacgataaagcggggctaaaaagcgcgaaagaactggatggcgctaccgtctgtattcaggcgggtactgataccgaactcaacgtcgccgactacttcaaggcaaacaatatgaagtacacaccggtgactttcgatcgctctgacgaaagtgcgaaggcactggaatctggtcgctgcgatacgctggccagcgatcaaagtcaactgtatgccctgcgcatcaaattaagcaacccagctgaatggattgtcttaccggaagttatcagtaaagaaccgcttggtccggtagttcgtcgtggcgatgatgaatggttcagcattgtacgctggacgcttttcgccatgctgaatgctgaagagatgggcatcaattcccagaacgtcgatgaaaaagcggctaatccagcaacgcctgatatggcacatctgctgggtaaagaaggcgattacggcaaggatctgaagctggataataaatgggcctataacatcatcaaacaggtgggtaactacagcgaaatttttgagcgtaacgtaggtagtgaaagcccgctgaaaattaaacgtgggcaaaataatctctggaataacggcggtattcagtacgcaccgcccgtgcgttaagtcggtgtgaggtaacgagcgtcgctacggcggcgctctcttcagcgttatgctttccgaggtttctatgtctcatcgccgcagtaccgttaaaggcagtctctcttttgccaaccctacggttcgcgcctggttattccagatccttgccgttgttgctgttgtcggcattgttggttggttatttcacaacactgtaacgaatctcaataatcgtggcattactagtggttttgcctttctggatcgcggcgctggcttcggtattgtccagcatttgatcgattaccagcagggcgacacctacggacgcgtttttattgtcggcttactcaatacgctactggtttctgcattgtgtattgtgttcgcttctgttttgggcttctttatcggtctggcgagacttagcgataactggctgctacgaaagctttccacaatttatattgagatcttccgtaatattcccccgctgctgcaaatcttcttctggtactttgccgtgttgcgcaatttgcccggaccacgccaggctgtgagcgcgtttgatctggcctttttgagcaatcgtgggctttatattccgagtccgcagctgggagacggatttattgcgtttatcctggctgttgttatggctatagtcctttctgttgggctattccgctttaataaaacataccagataaagaccggacaactgcgccgcacctggccgatcgccgcagtgttgatcattggtttgcctttactggcgcaatggctttttggcgcagcactacactgggatgtcccagccctacgaggctttaacttccgcggcgggatggttttaattcctgaactggcagccttaacgctggcacttagcgtttatacatctgcatttatcgccgagattatccgcgctgggatccaggcagtgccttatggtcaacatgaagcggctcggagtctgggattacccaacccggttacgctacgccaggtcattattccccaggcattgcgggtgattattccaccgttaaccagccagtatctcaacatcgtcaaaaactcctctcttgccgccgctattggctatcccgatatggttagcctgtttgccggcaccgtgctgaatcagacggggcaagccatcgagacgatagccatgaccatgagcgtctatctgattatcagcctgactatcagcctgctgatgaatatctataaccgccgcatcgcgatcgttgaacgctaaggagtcatgatgacaaaagtattgctgtctcatcccccgcgcccggcgagccataacagtagccgcgcgatggtgtgggtgcgaaaaaatctgttctccagctggagcaatagcctgctgactattggctgcatatggttgatgtgggaactgatcccaccgttgctgaactgggcatttttgcaggctaactgggttggcagtacgcgtgccgactgcacaaaagccggtgcctgttgggtcttcatccacgaacgatttggtcagtttatgtatgggctttacccacacgaccaacgctggcgaattaacctcgcattactgattgggcttgtgagcatcgcaccaatgttctggaaaatactcccgcatcgcggtcgctatattgcggcctgggcggtgatttacccactgattgtctggtggctgatgtatggcggtttttttgctcttgagcgggttgaaacccggcaatggggcgggctgacgctaactttaattattgcaagtgttgggattgcgggggcgctaccgtgggggatcttactggcgttaggtcgccgctcccatatgccgattgtgcgtatcttaagcgtcatttttatcgaattctggcgcggcgtgccgctgattaccgttctgtttatgtctagcgtcatgctgccgttgtttatggcagaaggcaccagtatcgacaaattgatccgcgcgctggttggcgtgatcctgtttcagagtgcatatgttgcggaagtcgtgcgaggtggattacaggcgctgcctaaagggcaatatgaagcggcagagagcctggcgttgggttactggaaaactcaggggctggttattctgccacaggcgttgaagctggtaattcctgggctggtaaataccatcatcgcactcttcaaagataccagcctggtgatcattatcgggttgttcgatcttttcagtagcgttcagcaggcaaccgttgatcccgcctggttgggtatgagcacggaagggtatgttttcgccgcgctgatctactggatcttctgtttcagcatgagccgctatagccagtatctggaaaaacgttttaacaccgggcgtacaccgcattgaggacactatgagccaaattttactgcaacctgctaacgcgatgattacgctggaaaacgtcaataaatggtatggacaattccatgttttgaaaaatataaatttaaccgtgcaaccgggagaacggatcgttctgtgtggccctagtggttccggtaaaagcacaaccattcgttgtattaatcatctggaagaacatcaacagggacggatcgtggtagatggcatcgaacttaatgaagatatccgcaatattgagcgcgtcaggcaggaagtgggaatggtctttcagcatttcaatctcttccctcatctgaccgttttacagaactgtaccctggcaccgatttgggtacgcaagatgcctaagaaagaggctgaagatctggcggtgcattacctagagcgggtgagaattgccgaacatgcgcataagtttcccggacagattagtggtggtcagcagcaacgcgttgccattgcgcgtagcctgtgtatgaagccgaaaattatgttgtttgatgagccaacgagcgcgctcgatcctgagatggtgaaagaggtgctggatacgatgattgggctggcgcagagcggtatgacaatgttgtgtgtaacacatgagatggggtttgcacgaaccgtcgctgaccgggtaatttttatggatcgtggggaaatagtggagcaagctgcacctgatgaattttttgcgcatcctaaaagtgagcgtacgagggcatttttaagccaggtaatccattaattgaatgttagttcgaaaagcaaaaaggccatcctttcggatggcctttcgcttgatttgatgtctggcagtttatggcgggcgtcctgcccgccaccctccgggccgttgcttcgcaacgttcaaatccgctcccggcggatttgtcctactcgggagagtgttcaccgacaaacaacagataaaacaaaaggcccagtcttccgactgagccttttgttttatttgatgtctggcagttccctactctcgcatggggagaccccacactaccatcggcgctacggcgtttcacttctgagttcggcatggggtcaggtgggaccaccgcgctactgccgccagacaaattcttttctaatctgccgaactttaacctaaaaagtggtgctgatacccagagtcgaactggggacctcacccttaccaagggtgcgctctaccaactgagccatatcagcacgctaaatttgatgcctggcagttccctactctcgcatggggagaccccacactaccatcggcgctacggcgtttcacttctgagttcggcatggggtcaggtgggaccaccgcgctacggccgccaggcaaattctgttttatcagaccgcttctgcgttctgatttaatctgtatcaggctgaaaatcttctctcatccgccaaaacagcttcggcgttgtaaggttaagcctcacggttcattagtaccggttagctcaacgcatcgctgcgcttacacacccggcctatcaacgtcgtcgtcttcaacgttccttcaggacccttaaagggtcagggagaactcatctcggggcaagtttcgtgcttagatgctttcagcacttatctcttccgcatttagctaccgggcagtgccattggcatgacaacccgaacaccagtgatgcgtccactccggtcctctcgtactaggagcagcccccctcagttctccagcgcccacggcagatagggaccgaactgtctcacgacgttctaaacccagctcgcgtaccactttaaatggcgaacagccatacccttgggacctacttcagccccaggatgtgatgagccgacatcgaggtgccaaacaccgccgtcgatatgaactcttgggcggtatcagcctgttatccccggagtaccttttatccgttgagcgatggcccttccattcagaaccaccggatcactatgacctgctttcgcacctgctcgcgccgtcacgctcgcagtcaagctggcttatgccattgcactaacctcctgatgtccgaccaggattagccaaccttcgtgctcctccgttactctttaggaggagaccgccccagtcaaactacccaccagacactgtccgcaacccggattacgggtcaacgttagaacatcaaacattaaagggtggtatttcaaggtcggctccatgcagactggcgtccacacttcaaagcctcccacctatcctacacatcaaggctcaatgttcagtgtcaagctatagtaaaggttcacggggtctttccgtcttgccgcgggtacactgcatcttcacagcgagttcaatttcactgagtctcgggtggagacagcctggccatcattacgccattcgtgcaggtcggaacttacccgacaaggaatttcgctaccttaggaccgttatagttacggccgccgtttaccggggcttcgatcaagagcttcgcttgcgctaaccccatcaattaaccttccggcaccgggcaggcgtcacaccgtatacgtccactttcgtgtttgcacagtgctgtgtttttaataaacagttgcagccagctggtatcttcgactgatttcagctccacgagcaagtcgcttcacctacatatcagcgtgccttctcccgaagttacggcaccattttgcctagttccttcacccgagttctctcaagcgccttggtattctctacctgaccacctgtgtcggtttggggtacgatttgatgttacctgatgcttagaggcttttcctggaagcagggcatttgttgcttcagcaccgtagtgcctcgtcatcacgcctcagccttgattttccggatttgcctggaaaaccagcctacacgcttaaaccgggacaaccgtcgcccggccaacatagccttctccgtccccccttcgcagtaacaccaagtacaggaatattaacctgtttcccatcgactacgcctttcggcctcgccttaggggtcgactcaccctgccccgattaacgttggacaggaacccttggtcttccggcgagcgggcttttcacccgctttatcgttacttatgtcagcattcgcacttctgatacctccagcatgcctcacagcacaccttcgcaggcttacagaacgctcccctacccaacaacgcataagcgtcgctgccgcagcttcggtgcatggtttagccccgttacatcttccgcgcaggccgactcgaccagtgagctattacgctttctttaaatgatggctgcttctaagccaacatcctggctgtctgggccttcccacatcgtttcccacttaaccatgactttgggaccttagctggcggtctgggttgtttccctcttcacgacggacgttagcacccgccgtgtgtctcccgtgataacattctccggtattcgcagtttgcatcgggttggtaagtcgggatgacccccttgccgaaacagtgctctacccccggagatgaattcacgaggcgctacctaaatagctttcggggagaaccagctatctcccggtttgattggcctttcacccccagccacaagtcatccgctaatttttcaacattagtcggttcggtcctccagttagtgttacccaaccttcaacctgcccatggctagatcaccgggtttcgggtctataccctgcaacttaacgcccagttaagactcggtttcccttcggctcccctattcggttaaccttgctacagaatataagtcgctgacccattatacaaaaggtacgcagtcacacgcctaagcgtgctcccactgcttgtacgtacacggtttcaggttctttttcactcccctcgccggggttcttttcgcctttccctcacggtactggttcactatcggtcagtcaggagtatttagccttggaggatggtccccccatattcagacaggataccacgtgtcccgccctactcatcgagctcacagcatgtgcatttttgtgtacggggctgtcaccctgtatcgcgcgcctttccagacgcttccactaacacacacactgattcaggctctgggctgctccccgttcgctcgccgctactgggggaatctcggttgatttcttttcctcggggtacttagatgtttcagttcccccggttcgcctcattaacctatggattcagttaatgatagtgtgtcgaaacacactgggtttccccattcggaaatcgccggttataacggttcatatcaccttaccgacgcttatcgcagattagcacgtccttcatcgcctctgactgccagggcatccaccgtgtacgcttagtcgcttaacctcacaacccgaagatgtttcacttcagagttgcgaaaatttgagagactcacgaacaactttcgttgttcagtgtttcaattttcagcttgatccagatttttaaagagcaaaacttcgcagtgaacctttgcaggtacactctgaagtattttttatttaatcactacagagatggtggagctatgcgggatcgaaccgcagacctcctgcgtgcaaagcaggcgctctcccagctgagctatagccccataacatgtagttaaaacctcttcaaatttgccgtgcaaatttggtaggcctgagtggacttgaaccaccgacctcacccttatcaggggtgcgctctaaccacctgagctacaagcctgtagaggttttactgctcattttcatcagacaatctgtgtgagcactgcaaagtacgcttctttaaggtaaggaggtgatccaaccgcaggttcccctacggttaccttgttacgacttcaccccagtcatgaatcacaaagtggtaagcgccctcccgaaggttaagctacctacttcttttgcaacccactcccatggtgtgacgggcggtgtgtacaaggcccgggaacgtattcaccgtggcattctgatccacgattactagcgattccgacttcatggagtcgagttgcagactccaatccggactacgacgcactttatgaggtccgcttgctctcgcgaggtcgcttctctttgtatgcgccattgtagcacgtgtgtagccctggtcgtaagggccatgatgacttgacgtcatccccaccttcctccagtttatcactggcagtctcctttgagttcccggccggaccgctggcaacaaaggataagggttgcgctcgttgcgggacttaacccaacatttcacaacacgagctgacgacagccatgcagcacctgtctcacggttcccgaaggcacattctcatctctgaaaacttccgtggatgtcaagaccaggtaaggttcttcgcgttgcatcgaattaaaccacatgctccaccgcttgtgcgggcccccgtcaattcatttgagttttaaccttgcggccgtactccccaggcggtcgacttaacgcgttagctccggaagccacgcctcaagggcacaacctccaagtcgacatcgtttacggcgtggactaccagggtatctaatcctgtttgctccccacgctttcgcacctgagcgtcagtcttcgtccagggggccgccttcgccaccggtattcctccagatctctacgcatttcaccgctacacctggaattctacccccctctacgagactcaagcttgccagtatcagatgcagttcccaggttgagcccggggatttcacatctgacttaacaaaccgcctgcgtgcgctttacgcccagtaattccgattaacgcttgcaccctccgtattaccgcggctgctggcacggagttagccggtgcttcttctgcgggtaacgtcaatgagcaaaggtattaactttactcccttcctccccgctgaaagtactttacaacccgaaggccttcttcatacacgcggcatggctgcatcaggcttgcgcccattgtgcaatattccccactgctgcctcccgtaggagtctggaccgtgtctcagttccagtgtggctggtcatcctctcagaccagctagggatcgtcgccttggtgagccgttaccccaccaacaagctaatcccatctgggcacatccgatgacaagaggcccgagggtccccctctttggtcttgcgacgttatgcggtattagctaccgtttccagtagttatccccctccatcaggcagtttcccagacattactcacccgtccgccactcgtcagcgaaacagcaagctgtttcctgttaccgttcgacttgcatgtgttaggcctgccgccagcgttcaatctgagccatgatcaaactcttcaatttaaaagtttgatgctcaaagaattaaacttcgtaatgaattacgtgttcactcttgagacttggtattcatttttcgtcttgcgacgttaagaatccgtatcttcgagtgcccacacagattgtctgataaattgttaaagagcagttgcgacgcggctttcagctcactgtcgcgaggtggcgtatattacgctttcctctttcagagtcaaccctgaatttcaggatttttttctcttcgttgttccgaccatcctgtgaagtgtttcacgttgtcgtctcaacggaggcgcattatagggatcccaattttttgcacaagtatttttttgatctttttttctgtttgttgttttttcaccctttttgctgcaatcgcacacaaaacggtgcttttttgcatactaaaagacttgcacaaggccaataatgcccccaaagtcattagtaaatcatttattgctgaggtaagtatgtctgatgttttacgcccataccgcgatctttttccacaaatcggtcagcgcgtaatgatcgacgatagcagtgtcgtgattggtgacgttcgtctggctgatgatgtggggatctggccgctcgttgtgattcgtggagatgtacattatgtacagatcggagcacgcaccaatatccaggatggcagtatgttgcatgtcactcataaatccagctacaacccagatggcaacccattaaccattggcgaagatgtcactgttggtcacaaggtgatgctccacggctgcaccattggcaatcgagttttggttgggatgggcagtattttacttgatggcgcaatagtagaagatgatgtgatgattggtgcgggtagtctggtcccacaaaataaacggctggagagcggatatctgtatctcggtagccccgtcaaacagatccgcccgttaagtgatgaagagaaggctgggttacgctattccgcgaataattacgtgaaatggaaggacgaatatctggatcagggtaaccagacccagccttgatcatcttcactttgttcctgaattaagttttccgcttcttcttccaggtcccagcgatgctgacgaaaactcgctaaccactgttctggcgtatctccagtaaagcgatacgccagactctcgccagagatcgcgcatgtcagttgcataccattcacgagagcgggaaaacatacacattttttattctcgtcccactcttccctgtccggaaactggatggcctgattcacgcggacaattcctcctgcaattgctttataactggttctacgtcaggcagaacaccgtgccagagaagaaaggcatgagccgcctgtgccaccagcattcctaaaccatcagcattacgcttactgcctcgctgctcacaccatgccagaaaaggagtttttcctttctgatagaacatgtcatagcaataaatgcctggatgaatgaggctactcgggatcgccggaatatcaccactgatgccactggatgttgcattaataatgagatcaaactcatgaccttccagttcgtccatactcaacgcctgaatactgccagtgtgcgcaaacaatttagccaactcttccgcgcgggataccgtccgattagttattgtcaccgcacagtccagggaaaggagtggcagtagtacgccgcgagatgctccaccagcgccgataagcagaatacgtaaaccagggcggataaaagacagacgttccagatcgcttaacaagcctacaccatcggtattgtcacccagcaggcgtccatcttctaaccgcatgagggtattaacagcaccagccaacgctgcccgttcagtaagctcatccgctctggcaaaagcctcttctttaaaaggcaccgtcacattcgcacctttaccaccagcactaaagaaagcgttcagtgtgttgatgaaatcattgatgggtgccaacacgcgcccatagggatgttcaatattcagttgctgagcaaattgctgatgaatgaatgggcttttgctgtgggctatcggattaccaaaaacagcataggtttccattatgttacccctgtcgaaacagttcacccgtcagggcatcgcggatttcactaggatttaaacgcccccccgtttcaccaggcacaaccgggaacgccgcgccaaattgtgcgcgaacttcgtctactgttcgacaaggtggcaatccactcaagttggcactggtagaaaccagcggtttaccataagcctggcacaaagcaaccaccaacggatggtcggtgactcgtacagcaaggctatcaaagcggcccgtcaaccagcgcggtgttgtcgcaggcgcgggaaagacaaaggtgacaggacctggccagcgggaaaaaatggtttcacgctgcacgtcagtcaacatggtgtcatcaatatagggtttaagctgctcgtaatttgctgcgattaaaatcagccccttatcaaccggacgctgttttaactccaacagtcgcatcactgctgtttcgctatcaggatcgcacccaacaccgaaaacggcttccgttggataggcgatgacacgttcttcattgagaacatctatcgcagctgcgatagcgtctctttgcaggttattattcacgttattattccgcgctaaccggctttccacattgtttactggcacaaaagtgttttacaccctgcgcggttttcttttcgatgagtagcggataatgacactcagggcattctccagctatgggtttgaagttaatggcaaattgacactccgggtagcgatcacaagagtgaaatgttttgccataacgggagcggcgctggaccagatggcccgtccgacattgggggcatgtaattgctgtttcgtccggtttatcgataagttcggtatgttcgcattcagggtagttaatgcaaccaataaacataccaaagcgtccctggcgtaataccagatttgcgccacatgcagggcaaacctgcccctccagaactttgacgatatgtccatccgcactagatttcagaggacggacgtagtcacacgccggatactgactgcatccaagaaacggaccgtgtttcccggatcgaataaccagttcagccccgcactttgggcaggactcattattacgcaccgtgaacagtgcacttttcgccataacaacttatgctgaattaaagaaatgattaatgcagcataccttcattcacttcaaagagtaattcttccatttgctggtacgcattttcgcagcccggaatattgaacaacaccatcaggatcacccatttcagatcatccagttcgaactctgcgttatccagcgcgagcactcgctctatcaccatttcacgagtttcaaggttgagcacctgaatctgctcaaggaaaagcagaaacccacggcagctggcatccagtcgttcacactcttccggtgtataaatacgcatggagagaggatcgctggccagttgcatcggttctgccaacccttcctgataatcagcaagtttttccagccatagcagggcattgtagatatcttctcgctcaaaacctgcgtcggtaagatcctgttcaagtttgtcttgatccacacgcaactcagcttctgtgtgaatataggtttcaaacaaatacattagtacgtcgaacatggcatgccctcctcaatcggacatagccgccgggtacagctgcgatccatcctgctaactccagttcgagtagttgagtaactacctctggcacaggttggccggcacgttcagcgacgacgtcaacaggtgttacctcatctcctacgttagccaggagctcaggaaatggcaatgccacgtcttgctgatctggactataaaaactattttcaggggcgtctggcaaccagtgcaatccaaattgcaagttttccagaatttcttccggttccgtcacaagaatcgcaccttgttttattaaccagtgaggcccttcgcttcccggattccctattggacctggcaaggcaaaaacttctcgcccctgctcaagcgcacaacgtgctgtcaccaggctaccactacgcaaagccgcttccaccaccagtacacctttacttagaccactgataatgcgatttcttcgtgggaaattgtaagcaaggggtggaacatcgaggggaaattcgctgacgagagcgcccccctgttcaagcagactggcagccagtcgggcatgacggcggggatgaatggtattaagtccattccccaatacagcaatgctgacgccatttacctgtaaggctgctttatgcgctacaccatcgattccacgcgccagtccactcgtaattgtcactccacgcgtcgccagagtttcgcaaaataatcgtccccatcgctcgccataccaactatgcgcccgactccccactacggcaagctgaaaactatgcagcgcgtgcagttctccttcaacaaacagtgcgccggggtaatctgtcgtcgccagaagttgaggaggataaaattcgctgtccgcaggaattaaatgatggttgggttgctccaaccaacaaagactgctttcgatactctttcgtggaaaactaagaaagcgttgtgcctgccgcaatgtaagccctgtttgctgcaatacaaccgcatcaatatggctctgttttgccacccagtgagcgatacggaccatatcatcgccgtacaagctgctgatactcattaaacgcagccaaatttctgtatcgaccatccttatctccctgccataagcagccttagcaatctttgcgattggtcagtgatgctgtcaatcagagggggatttgtctagaatagaagaaataatctttctaactcctgaacacatctctggagatttatgagcgttttgcaagtgttacatattccggacgagcggcttcgcaaagttgctaaaccggtagaagaagtgaatgcagaaattcagcgtatcgtcgatgatatgttcgagacgatgtacgcagaagaaggtattggcctggcggcaacccaggttgatatccatcaacgtatcattgttattgatgttagcgaaaaccgtgacgaacggctagtgttaatcaatccagagcttttagaaaaaagcggcgaaacaggcattgaagaaggttgcctgagcatccctgaacaacgtgctttagtgccgcgcgcagagaaagttaaaattcgcgcccttgaccgcgacggtaaaccatttgaactggaagcagacggtctgttagccatctgtattcagcatgagatggatcacctggtcggcaaactgtttatggattatctgagtccgctgaaacaacaacgtattcgtcagaaagttgaaaaactggatcgtctgaaagcccgggcttaaggataagaactaacgtgagtgaaagtctacgtattatttttgcgggtacacctgactttgcagcgcgtcatctcgacgcgctgttgtcttctggtcataacgtcgttggcgtgttcacccagccagaccgaccggcaggacgcggtaaaaaactgatgcccagcccggttaaagttctggctgaggaaaaaggtctgcccgtttttcaacctgtttccctgcgtccacaagaaaaccagcaactggtcgccgaactgcaggctgatgttatggtcgtcgtcgcctatggtttaattctgccgaaagcagtgctggagatgccgcgtcttggctgtatcaacgttcatggtagtctgctgccacgctggcgcggtgctgcaccaatccaacgcagtctatgggcgggtgatgcagaaactggtgtgaccattatgcaaatggatgtcggtttagacaccggtgatatgctctataagctctcctgcccgattactgcagaagataccagtggtacgctgtacgacaagctggcagagcttggcccacaagggcttatcaccacgttgaaacaactggcagacggcacggcgaaaccagaagttcaggacgaaactcttgtcacttacgccgagaagttgagtaaagaagaagcgcgtattgactggagtcttagcgcagcacagcttgaacgctgcattcgcgctttcaatccatggccaatgagctggctggaaattgaaggacagccggttaaagtctggaaagcaagcgtcattgatacggcaaccaacgctgcaccaggaacgatccttgaagccaacaaacaaggcattcaggttgcgactggtgatggcatcctgaacctgctcagcttacaacctgcgggtaagaaagcgatgagcgcgcaagacctcctgaactctcgtcgggaatggtttgttccgggcaaccgtctggtctgatagtccactcttctaagcccggtcttgccgggcgtttttatacttatgaaaaaacaacgtaatttacgtagcatggcggcccaggccgttgaacaagtcgtcgagcaagggcaaagtttaagcaacattctgccaccgctccagcaaaaagtttccgataaagacaaagcacttcttcaagagttgtgctttggcgtactgcgtacgcttagccagttagactggctgattaataagttaatggcccgtccgatgaccggcaaacagcggaccgtgcattacctgattatggttggtttgtatcaactgctttatacccgcattccacctcatgctgcgctggctgaaacggttgaaggcgctatcgcaattaagcgtccgcaacttaaagggttgataaacggtgtattacgccagttccagcgtcagcaagaagagttattagccgagtttaatgccagtgatgcacgttatctgcatccttcctggttgctgaagcgtctgcaaaaagcgtatccagagcagtggcaatccatcgtcgaagccaataaccagcgtccgccaatgtggctgcgtattaatcgtacgcatcattcccgcgacagctggcttgcattgctggatgaagcaggaatgaaaggtttcccgcatgcggattaccctgatgctgtacgtctggaaacacctgcacctgttcatgcgctacctggttttgaagacggatgggttaccgttcaggatgcaagtgcacaaggttgcatgacctggcttgcgccacaaaacggtgaacacattttggatctttgtgccgcccccggcggtaaaacaacgcatatccttgaggtggcaccagaagcgcaggttgttgcggttgatatcgacgaacagcgcctctctcgggtttacgacaatttaaaacgccttggtatgaaggcgaccgtgaaacaaggtgatggccgttacccttctcaatggtgtggcgagcaacagtttgatcgcattttattagatgcgccttgtagtgcaaccggtgtgattcgtcgccatccagatattaaatggttacgtcgcgatcgcgatatcccggaactcgcgcaattgcagtctgaaattctcgacgccatttggccgcatttaaaaaccggtggaactctggtctatgccacctgtagcgtgttaccggaagagaatagcctgcagattaaagcctttttgcaacgtaccgctgatgccgaactttgcgaaacaggaacaccagagcaaccgggtaaacaaaatctacctggtgccgaagagggcgacggcttcttttacgctaagctaatcaaaaagtgatgagataacgggtcgcgactgatgaaaattatcattctgggtgccggccaggttggcggcacactggcggaaaacctggttggcgagaacaacgatattactgttgtcgataccaacggtgagcgtctgcggaccttacaggataaatttgacctgcgggtcgtgcaggggcatggctctcatccacgcgtattgcgggaggcaggtgccgacgacgccgatatgctggttgctgtaaccagtagtgatgaaaccaatatggttgcctgccaggtagcctacagtcttttcaacacccctaatcgcatcgctcgtatccgcagtccagactacgtgcgcgatgccgataagctatttcatagtgatgctgtgccgattgatcatctgatcgcaccagagcagttggttatcgataatatttaccgactgattgagtatcccggcgcattgcaggtggtgaacttcgctgagggtaaagtcagcctggctgtggttaaagcctattatggcggcccgctgattggtaatgcacttagcaccatgcgcgaacatatgccacatatcgatactcgtgtggcagcaattttccgccacgatcgccccattcgtccgcaaggtagcaccattgttgaagctggtgatgaagtgttctttattgccgctagtcagcatatccgcgcggtgatgagtgaattacagcgactggaaaaaccgtataagcggatcatgctggttggtggcggtaatatcggtgcagggctggcgcgtcgtctggaaaaagattacagcgttaaactcatcgaacgtaatcagcagcgcgctgccgaactggcggaaaagttacagaatacgatcgtcttttttggtgatgcgagcgatcaagaactactggccgaagaacatatcgatcaagttgatctgtttattgccgtcaccaacgatgacgaggccaatatcatgtccgccatgcttgccaaacgtatgggtgcgaaaaaggtgatggtattgatccagcgtcgcgcttatgtggatctggttcaggggagcgttatcgatattgcgattagtccacaacaagcaactatttctgcgttgcttagccatgtgcgaaaagcagatattgttggtgtttccagtttgcgccgcggcgtagcagaagctattgaagccgttgctcacggtgatgaaagcaccagtcgcgttgtcggcagagtcattgacgaaatcaagctaccgccaggaacgattattggagcggtggtacgtggaaacgacgtgatgattgccaatgacaatctgcgcattgagcaaggcgatcacgtaattatgttcctcacagataaaaagtttattaccgacgtcgaaagactcttccagccaagccctttcttcttgtaattaataaggcgtctaatgacgccttattatttccctttgattatcaaggattaattaaattcattcctggcaggaaaatggcttaacatttgttagacttatggttgtcggcttcatagggagaataacatgagcattattaaagaatttcgcgaatttgcgatgcgcgggaacgtggtggatttggcggtgggtgtcattatcggtgcggcattcgggaagattgtctctagtctggttgccgatatcatcatgcctcctctgggcttattaattggcgggatcgattttaaacagtttgctgtcacgctacgcgatgcgcagggggatatccctgctgttgtgatgcattacggtgtcttcattcaaaacgtctttgattttctgattgtggcctttgccatctttatggcgattaagctaatcaacaaactgaatcggaaaaaagaagaaccagcagccgcacctgcaccaactaaagaagaagtattactgacagaaattcgtgatttgctgaaagagcagaataaccgctcttaacaagcgccactaagcagaagaccagtggtaaaaaagtgatttactttcttgccactggcctcccagttcccccgattgccatgttttccttttcgcatgtaactgcctttccccttcttatttttctctacgcgctgtcggaataagggatcatgtagtaatgcttctatcgcattatcctttatctgccctttagtatgctgatatcgactcataaaaactccagttggttatttaacggcgcgagtgtaatcctgccagtgcaaaaaatcaacaaccactcttaacgccactcgccccttgttcaagagcttcaagaatgctacaataaacactgctatgagcagtcccacaacaggcatcgttaaggcgttgcaaggaacgctgcatactctgcaactcggctatccgtgcttcgacttcctgcaatctttcctgcacaatgcctttactctcctgacaggtatggtgttcaggatcgatgcggatgctcagcaactcgcggatgctctccagactgaaacctagttgtctggcatggcggataaatttcaatcgctggagatcgctttcggtatataggcgaaacccaccttcagtacgcacttcatgctccatcatctgctgtttttcgtaataacgaatcgtgtcgggtgttacttccgccatttttgccagctcaccaatgcgatacatacatactccattagttatcgttgattttgtccaacaacttgtcagcataatcgccgcgtaaaaaatcggtactcaatccagcttgtcgcagcttcaattccagtaaactcaatcgacggctaacctcttgatattgcggatcatcgtgacggatacctttgagaatatccagaagctgaattgcttctctccgttgctcaagttctggcggtaagcaaccggcattcttcagcaagcgataccccgcacgtaattccggtggcacgtgagaatcatcatccagtatcaatggttcgccgctacctgccaggttatcaaactcacctttcgcttgcgcttctgctatatggcgctctgcccactggtcaagtaaccacataaatactccaggggatgaacaaaaagagtacagctattgtagataagtggggatactacgggtataaaaaaacccgccggggcgggtttttttacgttgcttcagattactctgcagcagcttctgctttctcactacgatcaaccagctcgatgtaagccatcggcgcgttgtcgcctgcacggaagccacacttcagaatacgagtgtaaccaccggcacggctcgcgaaacgcgggcccagttcgttaaacagttttgccacgatctcgttatcacgagtacgggtgaatgccagacgacgattagcaacgctatcagtcttggcaagagtaatcagcggctcaactacgcggcgcagctctttcgctttaggcagagtcgtcttgatgatttcatgacgaaccagactacctgccatattgcggaacatagcctggcgatggctgctgttgcggttcagttgacgaccactcttacgatggcgcatgaccttatccttctcagtaaaaccttaacctgtgattcggttactcgtcagcgatgcttgccggtggccagttttccaggcgcatgcccagagacagtccacgggaagccagcacgtctttaatctcagtaagagattttttaccaaggttaggcgttttaaggagctcaacctcggtacgctgtaccagatcaccgatatagtggatagcttctgctttaaggcagttagcagagcggacagtcaattccagatcgtcaacagggcgcagcaggatcggatcgaactctggtttctcttctttcacttcaggctgacgtacatcacgtaagtcaacgaaagcttccagttgttcagccagaatggttgccgcacgacgaatcgcctcttcaggatcgattgtgccgttggtttccatttcgatgaccagcttgtccaggtcggtacgctgttctacacgcgctgcttcaacattgtaggcaatacgctccacagggctgtagcatgcgtcgaccagcagacggccgattgggcgctcatcttcttcgctatgaattcgggtagaagccggcacataaccacgaccgcgctgaactttgatacgcatgctaatagacgcgttctcatcggtcaggtggcagatcacgtgctgcggcttgacgatttcgacatcaccgtcgtgggtgatatcggctgcagtcacagggccaatgccagatttattcaaggtaagaataacttcatctttgccctgaactctcaccgccagccctttcaggttgagcaggatttccaggatatcttcctgaacgccttctttggtgctgtactcatgtagtacaccatcaatctcaacctcggtcaccgcgcaacccggcatgctactgagcagaatacggcgcagtgcgttacccagagtatggccaaagccacgctctaaaggctcaagggtcaccttggcgtgcgtgctactcacttgctcgatatcaaccaggcgcggttttagaaactctgtcacagaaccctgcattgtgtcctctctttggtactaagctttacttggagtaaagctcgacgatcaggtgttcgttaatgtccgcagacagatcagaacgctccggcttacgcttaaacgtaccttccatcttgccagcatcaacttccagccaggttggcttttcacgctgctcagccagctccagagcggctttcacgcgagactgcttcttcgctttctcacgaatgcttacaacgtcattcggactaacctgataagaagcgatgttaacaacacgaccgtttaccataattgctttatggctaaccagctgacgtgcttctgcacgagtggcaccgaagcccatacggtatacaacgttgtccagacgaccttccagcagagccaacaggttttcaccggtgttgcctttcagacgtgctgcttctttgtagtagttacggaactgacgctccagcacaccatagatacggcgaactttttgcttttcacgcaactgcacaccatagtcagacagacgcggtttacgcgcaccgtgctggccaggagcttgttcaattttacacttggtatcgatcgcgcgaacgccagacttaaggaataagtcggtgccctcacgacggctcagcttgagcttaggacccaaatatcttgccattttctttctccaacaaacctggaaaacgaggcgttatacgcgacgttttttcggcggacgacaaccgttatgagggatcggagtcacatcagtaatgttagtgatgcggaaacctgcggcgttcagagcacgaatagtagattcgcggcctggacccggacctttaaccataacttccagattcttgatgccgtattctttcacggcgtcagcgcaacgctctgctgcaacctgagctgcaaacggagtggatttgcgagaaccacggaaaccggaaccaccggctgttgcccaacccaacgcgttaccctgacgatcagtgatagtcacgatggtgttgttgaaagaagcatggatatgagccacgccgtcagagacttgttttcttacacgtttacgtgcacgaattggtgcctttgccattattcaatcaccccgattatttcttgatcggtttgcgcggacccttacgggtacgtgcgttggtcttggtacgctgaccgcgaaccgggagaccacgacgatgacgcaaaccgcgatagcaaccaagatccatcaggcgcttgatgctcatgctgatttcacggcgcagatcaccttcaacgacaaatttggcaacttcgtcacgcagcgtgtcgatttgtccttcagacagctcactgatcttaacatcttcagcgatacccgctgcagccaggatggctttagaacgggtcttgccgacgccataaatgctagttaatgcgattacggcatgcttatgatcaggaatgttaatgcctgctatacgggccactatgcactcctactatttaatatgtacgttccatgctgaaaagcccgttttcaggatactcaaatggaaacgcacagacatacaaaagattggctggctaatctagccagctcaacccaactttgcaagaaaaatatgcgaaaaaatcagccttggcgctgtttatgcttcggctcggcactgcaaatcacacggatgacaccatcacgcttaacgattttgcagttacggcataatttcttgacggaagcacgaactttcatttttactctccgtaacttctcgggcgaccaattatcggccgtagcctttcaggttcgccttcttcaatgcagactcatactgactggacatcatcagagtttgcacttgagccataaagtccataatcacgacaacaacgataagcagactggtcccaccgaagtagaacggtactttcattgcatcacgcatgaactccgggatcaggcagataaaggtaatatacagcgcaccaaccagggtcaggcgggtcattactttatcgatatacttcgccgtttgctctcccggacgaattcctggtacaaatgcaccggacttcttcaggttatctgctgtttcacgcgggttgaaaaccaacgccgtgtagaagaaacagaagaagatgattgcagacgcatagagtaacacataaagcggttgcccaggctgcaaatacaggctaattgttgtcagccagttccaaccagtaccgcccccgaaccaactcgcgatggtcgccgggaacagaataatactggaagcgaagattgccgggattacccccgccatattcactttcagcggtaaatgtgtgctctgtgcagcatagacacgacgaccttgctgacgtttcgcgtagtttaccacaatgcggcgttgaccacgctcaacaaatacaacaaagaacgtcactgcaaatactaatactgcaaccaacagcaacacgaggaagtgcaggtcgccttgacgcgcttgctcgatagtatgggcaatggctggcgggagtcccgcgacaataccggcgaagataatgatactaataccgttgccgatacctcgttcagtaatctgttcgcccaaccacatcaggaacatggttcctgtgaccagacttacaacagcggtgaagtagaatgcaaagcccgggttaatcaccaggccttgcataccaggcatattcggcagaccggtagcaataccgatgctctggaatattgccagcaccagagtaccgtagcgggtgtactggctgatcttacgacgaccagactccccttctttcttaatttctgccaacgttgggtgaaccaccgtcagcagctggataatgatgctcgcgctaatatacggcatgatccccagagcaaagatagaagcacggctgagagcaccaccagagaacatgttaaacatctcaatgatggtgcctcgctgttgctcaagcagtttggcaagtacagcggcatcaataccagggatcggaataaaagagccaatacggaacacaatcagcgcaccgataacaaacagcagtctgcgtttcagctcgcctaagccacctttggcactttgaaaatctaatcccggttgtttagccatctgctacttattcctcgattttaccgccagcagcttcgatagcagcacgagcgcctttagtaacacgcaggccacgaacagttaccggagtcgttacttcgccagccaggatcactttcgcgaactcgatctggataccgataatgttagccgctttcagcgtgttcaggtctactacaccgccttctactttagccaggtcagacagacgaatttcggctgtaatcgctgctttacgagaagtgaagccgaatttcggcagacgacggtacagaggcatctgaccaccctcgaaaccgcgacgtacgccaccgccagaacgagacttctgacctttgtgaccacgaccaccggttttaccgaggccagaaccgataccacgacccaggcgtttacccgcctttttggagccttcggccggagacagagtatttaaacgcatctcttactcctcaactttaaccatgaaggaaaccgcgttgatcataccgcgaatagcaggagtatcctcgcgctctacggtgtgaccaatacgacgcagacccaggccaagcagcgttgccttgtgtttcggcagacgaccgattgcactgcgggtttgagtaattttaatagtctttgccatggtttatttccccagaatttcttcaacggatttaccacgcttggcagcgaccatttctggagaattcatattttccaggccatcaatagttgcacgaaccacgttgatcgggttggtggaaccataggctttagccagaacgttatgaaccccagcgacttccagaacggcgcgcattgcaccaccggcgatgataccggtaccttcggaagccggctgcatgaatacgcgagaacccgtgtgaacacctttaacagggtgttgcagagtgccgttattcagcgcgacgttaatcatattgcgacgggctttttccatcgctttctggatcgctgctggaacttcacgcgctttaccgtaaccaaaaccaacgcgaccgttaccatcgccaactacagtcagagctgtgaaggagaaaatacgaccacctttaacggttttagatacgcggtttaccgcgatcagcttttcctgcagttcgccagcttgtttttcgatgtgagccatcttacacctctaccttagaactgaaggccagcttcacgggcagcatctgccagtgcctggacacgaccatgatattggaacccggaacggtcaaaggatacatctttgatgcctttttccagagcgcgttcagcgacagctttacccacagctgcagccgcgtctttgttaccggtgtacttcagttgttcagcgatagctttttctacagtagaagcagctaccagaacttcagaaccgttcggtgcaattacctgtgcgtaaatgtgacgcggggtacgatgtaccaccaggcgagttgcgcccagctcctggagcttgcggcgtgcgcgggtcgcacgacggatacgagcagatttcttatccatagtgttaccttacttcttcttagcctctttggtacgcacgacttcgtcggcgtaacgaacacccttgcctttataaggctcaggacgacggtaggcgcgcagatccgctgcaacctggccgatcacctgcttatcagcgcctttcagcacgatttcagtctgagtcggacattcagcagtgatacccgcaggcagctgatggtcaacaggatgagagaaacccagagacaggttaatcacattgcctttaaccgctgcacggtaacctacaccaaccagctgcagcttcttagtgaagccttcggtaacaccgataaccatactgttcagcagggcacgcgcggtaccagcctgtgcccaaccgtctgcgtaaccatcacgcggaccgaaggtcagggtattatctgcatgtttaacttcaacagcatcgttgagagtacgagtcagctcgccgtttttacctttgatcgtaataacctgaccgttgatttttacgtcaacgccggcaggaacaacgaccggtgctttagcaacacgagacattttttcctccgattaggctacgtagcagataatttcgccaccaagaccagcctggcgcgctgcacgatcagtcataacacctttagaggtagaaacaactgcgatacccagacccgccataactttcggcagctcatctttacgtttatagatgcgcagacctgggcggctgacacgctgaatgctttctacaacagctttgccctggaaatacttcagagtaagttccagttcaggcttggtgtcgccttcaactttaaaatcttcaataaaaccttcttccttcagcacgttggcgattgccactttcagcttggaggaaggcatggtgaccgcagctttgttcgcggcctgaccgttacggatacgggtcagcatatccgcgatcggatcttgcatgctcatctgtctttactcccgtgattcaattggtgacaattaccagctagcctttttcagacccgggatttcaccgcgcatagcggcttcacggaccttaatacggctcaacccgaacttccgcaggaaaccatgcggacgacctgtttgacggcagcggttacgctgacgagacgggctggaatcacgcggcagagtctgcagcttgagaacagcgttccaacgatcttcgtcggaagcgttcacatcagagatgatcgctttcagttcagcgcgtttcgcgaagtatttatcagctaaagctacgcgttttacttcgcgtgctttcatactttgcttagccatttagtaaccctaccttacttgcggaacgggaagtcaaaggcagccagcagagcgcggccttcttcgtcagatttcgcagtagtggtaatggtaatatccaaaccacgaacgcggtcgactttatcgtagtcgatttctgggaagatgatctgctcacggacacccatgctgtagttaccacgaccgtcgaaagacttagcggacaggccacggaagtcacggatacgaggtacagcaatagtgatcaggcgctcaaagaactcccacatgcgttcgccacgcagagttactttacagccgatcggatagccctgacggattttgaagcctgcaacagatttgcgtgctttggtgatcagcggtttttgaccggagattgctgccaggtctgctgctgcgttatccagcagttttttgtcagcgatcgcttcaccaacacccatgttcagggtgatcttctcgacccgagggacttgcatgacagaattgtagttaaactcagtcatgagttttttaactacttcgtctttgtagtaatcatgcagtttcgccatcgtactactccaaattacttgatagtttcgctgttagacttgaagaaacggacttttttaccgtcttcgaatctaaagcctacacggtcagccttgccggttgccgcattgaagattgctacgttggaaacctgaatagcggcttctttttcaacgatgccacccggttggttcagggccggaaccggcttctgatgtttcttaaccaggttgataccttcaacaatgaccttgccggaagacaggacattcttaactttaccgcgtttacctttatctttaccggttaacacgataacttcgtcatcacgacggattttcgctgccatgattcgctccttagagtacttctggtgccagagagataattttcatgaacttctcactacgaagctcacgagttaccggcccaaaaatacgcgtaccgataggctgctcgctgttgttgttcagaagaacacaagcattaccatcgaagcgaatgacagaaccgtccgggcgacgaacacccttcttggtgcgcaccactaccgccttcagcacatcaccttttttgaccttaccacgcggaattgcttctttgatggtgatcttgatgatgtcgcctacgcctgcgtagcgacggtggctgccacccagaaccttgatacacattacgcgacgtgcaccggagttgtcggcgacgttcagcatagtctgttcttggatcattttagtgctccgctaatgtcaactactactgagacccgaaaatcaggtcgttaaaaatccccatatcgagggcgcggcattataacaccgcttcaaggatatgggtagaaaaaataaacggctcatttctgagccgtttattcgtattgagagagtgtactgtattacagaaccgctttctctacaacgcgaaccagcgtccaggatttagtcttggacagcggacggcattcgcggatttcaaccacgtcaccgataccgcattcgttgttctcgtcatgtacgtgcagtttggtcgtacgcttgatgaatttaccgtagatcgggtgtttcacaaaacgttcgatagcaacaacaatggatttctccattttgtcgctaacaacgcgaccttgcagagtacggattttatcggtcattacgcacccgccttctcgttcagtaaagtcttaacgcgtgcgacatcgcgacgcacttgcttcaacaggtgagactgttgcagctggccacttgcagcctgcatacgcaggttgaactgctcacgcagcaggttcagcagctcggtgttcagctcttcaacgctcttctcacgcagctcttttgctttcattacatcaccgtcttagttacaaaggtggttttaatcggcagtttcgctgctgccagcttgaatgcttcacgggccagctcttccggaacaccgtccatttcatacaggactttacccggctgaatcaaggcaacccaatactccacgttacctttacctttacccatacgcactgccagcggcttttcagtgatcggtttgtccgggaacacacggatccagatcttaccttgacgcttaactgcacgggtcatagcacgacgtgctgcttcgatctgacgggcagtcagacgaccacggccaacagctttcagaccgaagctgccgaagctaacatccgtaccctgcgccagaccgcggttacggcctttgtgcattttacggaattttgtacgctttggttgtaacatcagcgacgctccttatttacggcctttacgctgctgctttttaggctgagcagccggtttttccggttgttcaacagcagccataccacccaggatctcgcctttgaagatccacactttaacgccgattacaccgtaagtggtgtgcgcttcagaggtgttgtagtcgatgtcagcacgcagagtgtgcagcggtacgcgaccttcgcggtaccattcggtacgtgcgatttccgcgccgcccagacggccgctaacttcaactttaatacctttagcgcccagacgcattgcgttctgtacagcacgcttcatagcacgacggaacataacgcgacgttccagctgagaagtgatgctgtcagcaaccagttttgcgtccagttcaggcttacgaacttcggcgatgttgatctgtgcaggaacgccagcgatgtccgctacgaccttacgcagtttttctacgtcttcaccttttttaccgataacgatacccgggcgagcagtgtgaatggttacacggatgctcttagccggacgctcgataacgatacgagatacggacgctttagccagttccttagtcaggtactgacgtactttaaaatcgctgtccaggttgtcagcgaattctttggtgttcgcaaaccaggtagagttccatggttttacaatacccaggcgaataccattaggatgtactttctgacccattgctagtctccagagtctcagcgatcggacacaaccacagtgatgtggctggtgcgcttcaggatgcgatctgcacgaccttttgcacgcggcataatgcgcttcatgctcgggccttcgtctacgaaaattttcgtaactttcagatcgtcaatgtcagcgccatcgttgtgttcagcgttagcaatggcagattccagaactttcttgaccagtacagccgctttcttgttggtgtaggtcaaaatatccagagcctggctcactttcttaccgcgaatcaggtcagcaacaaggcgaaccttctgagcagaagaacgagcatggcgatgtttagcgatagtttccatctcttcctcctaccttatttcttcttcgcttttttatcagcagcgtggccgcgataagtacgagtcggtgcgaattcacccagtttgtgaccaaccatttcgtcggttacaaataccggaacgtgctgacgaccattatggacagcgatggtcaaaccgatcatgttaggaaagatcgtactacgacgggaccaagtgcgcaggggcttcttgtctccgctttccaccgctttctctaccttcttcagcaagtgcaggtcaataaaaggacctttcttgagagaacgtggcatggcttatcctctaaaattatttgctacggcgacgtacgatgaatttatcagtacgcttgttgctgcgggtcttcttacctttggtctgaacgccccacggagttaccgggtgcttaccaaagttacgaccttcaccaccaccatgtgggtggtctaccgggttcatcgcggtaccgcgaacggtcggacgaacaccacgccagcgtgcagcacctgctttacccagaacgcgcagcatatgctcagcattgccaacttcgcccagagttgcacggcagtctgcttctactttacgcatttcaccagaacgcagacgcagggtgacataagcaccatcacgagcaacgatctgaacgtaagtaccagcggaacgtgccagctgaccgcctttacctggtttcatttctacgttatgaacagtagaaccaaccgggatgttgcgcatcggcagggtgttacctggtttgattgcagcatcaacgccagactgaatctggtcgccagctttcaggcctttaggggccaggatgtaacggcgttcaccgtctttgtacagaaccagcgcgatgttcgcggaacggttcggatcgtactcaagacgttcaacaactgccgggataccgtctttgttgcgtttgaagtcaacaatacggtaagcctgcttgtggccaccaccgatatgacgagtggtgatacggccattgttgttacgaccaccggatttgctgtttttttccagcaacggagcaaaaggtttgcccttgtgcagctcagggttaaccactttaactacgtggcgacgacccggagatgtcggtttacatttaacaactgccattgtattactcctccgacttactcagcgccgccaacgaagtccagattctggccttctttcagggtgacgtaagcttttttccagtcgctacgacgaccgatacgctgtccgtgacgtttaactttccctttaactaccagggtgttaacgacttcgacttcgacttcaaacagtttctgcacagcagctttgatttctgctttggtcgcgtctttagcaactttgagtacgatggtgttggatttttccatcgcagtagacgctttttcagaaacgtgcggtgcacgcagcaccttcagcagacgttcttcacgaatcatgccagcatctcctcaacttgcttaacagcatcagcagtcattacgactttgtcgaaggcgatcaggctaaccgggtcgataccagttgcatcgcgtacgtcaaccttgtgcaggttgcgcgcagccaggaacaggttttcgtccagctcaccggtgatgatcagcacatcttccagagccatgtctttcagtttctgtgccagcagcttagttttcggcgcttctacagagaacttctcgacaacgatcagacgatcctgacgtaccagttcggacaggatgcttttcagcgcgccgcggtacatcttcttgttaactttttgactgtggtcctgcggacgagcagcaaaggtcacgccaccagaacgccagatcgggctcttgatagaaccagaacgcgcacggccggtgcctttctggcgccacggttttttaccggaaccagttacttcagcacgagtcttctgagcacgagtaccctgacgagcaccagctgcataagcaacaacaacctggtgaaccagcgcttcgttgaaatcacgaccgaaggtagtttcggaaacagtcagcgcgctctgcgcgtctttcaatactaattccattgctatctccttacgccttcacagctggtttaacgatcaggtcgctaccggttgcacccgggacagcacctttaaccagcagcaggttgcgctcagcgtcaacgcgtactacgtcaaggctctgaacggttacacgttcgttacccatctgacctgccattttcttgcctttgaacactttgcccggagtctggttctgaccgatagaacccggaacgcggtgagacaaggagttaccgtgagtagcgtcctgggtacggaagttccagcgcttaacggtacctgcgaaacctttacctttagaggtgccagttacgtcaacttttttaacgtcagcaaacagttcaacgctaatgctctgacctacagtgaactcttcgccttcagccaggcggaattcccacagaccacggccagcttctacgccagctttagcgaagtggccagcttcaggcttggtcacacggttagcttttttagcaccggtggtcacctgaatagcacggtagccatcgttagccaggtctttaacctgagtaacgcggtttgcttcaacttcgattacggttactgggatagaaacgccgtcttctgtgaagatacgggtcatacccacttttttaccgactaaaccaatcattgtttcaacctctcaatcgctcaatgacctgattaacccaggctgatctgcacgtctacaccggcagccagatccagacgcatcagagcatcaacggttttctcggttggctcaacgatgtcaaccagacgcaagtgagtacggatttcgtactgatcgcgcgcgtctttgttgacgtgcggggagatcagaacagtgaagcgctctttgcgtgtcggcagcgggatcggaccacggacctgcgcaccagtgcgcttggcagtctcgacgatttccgcggttgcttgatcgatcagacgatgatcaaacgctttcaggcggatacggattctttggttctgcatgagaccagagctccaattattttataaacgaaaatgattactcctcagacccattacgattgatgggagagtgtaaccgttcttacgtagctccccgattgggagcattgttaggtagccaaattcggctaactgaggttcagattgaacctgctgtcaactacgacaagcccgcgcattatacatacttaaccaccgaacgcaagcgtattgctagtaaagtaaacagccttcgggttatctctcaagttcgttcagtgcatttttgacacgctctcttaaaccggctttctcttcgctttcttccacagtattttcttcgtcttcagaagaagagggggcattctcaaccgcgacgcctgggtcatcttcctcctcgacggattcgacgacggggagtggctgttttttgaagaaatagtgttgtgtactttgtttaaaagcgggcgtttcagcctctacagtgacttcggcttttactatccaaagcacccatagctgcctggcatacccaccaaccagcaccattcctgcaaaccacaggcaaatcagtaataaacaaattacatatattatggtgctgtgtttttgtcgggagaagataccagggtgacctgtttctttctgctcacgcgcggcgatatagaattcaaacattataatcccttgtgacgtaaaaactgcaaaacaaaagtcctacgcaggaattatttacgttttacgagaacccttcaatatgaattaaattacggcattaaaaataagaaaaaagcctgacaaatgaagcattttaaaaacagaaacattcatatttaaaatgttaaattgaattgatattttaaatatgaataatttattcgttctgacagtacgaataagatatgccgtcaacaaatgcaaaaagggcgccgaagcgcccttttcaattcaaaactaattaacgtgtaattagcccagaactttagcaacaacgcccgcgccaacggtacggccgccttcacggattgcgaaacgcagaccgtcgtccatcgcgatcgggtggatcagggtaacaaccattttgatgttgtcgcccggcattaccatctctacgccttccggcagttcgatggtaccagtcacgtcagtagtacggaagtagaactgcggacggtagcctttgaagaacggagtatgacggccgccttcatctttggacagaatgtacacttcagattcgaacttggtgtgcggcttgatggtgcccggcttagccagtacctgaccacgttcgatttcttcacgtttgataccacgcagcagaacacctacgttctcaccagcacggccttcgtccagcagtttgcggaacatttcaacgccagtacaggtagacttctgagtctctttgataccaacgatttcaacttcttcaccaactttgatgataccgcgttctacacgaccggtaacaacggtaccacgaccggagatggagaatacgtcttcgatcggcagcaggaacggcttgtcaatcgcacgctctggttccggaatataagaatccaggaagccagccagttccaggattttcgcttcccactctgcgtcgccttccagcgctttcagagcagaaccacgaacgatcggagtgtcgtcgcccgggaagtcgtactgagacagaagttcacgaacttccatttcaaccagttccagcagctcttcgtcatcaaccatgtcgcatttgttcaggaacacgatgatgtacggaacgcctacctgacgacccagcaggatgtgctcacgagtctgcggcatcgggccgtcagtcgcagcaactaccaggatcgcgccgtccatctgagcagcaccggtgatcatgtttttaacatagtcggcgtgccccgggcagtctacgtgtgcgtagtgacgggtcggggtgtcgtattcaacgtgagaagtgttgatggtgataccacgagctttttcttccggcgcgttatcgatctggtcgaatgcacgagcagcaccgccgtaggttttagccagtacggtggtgattgcagcggtcagagtagttttaccgtggtcaacgtggccgatagtaccaacgttaacgtgcggttttgtacgttcaaatttttctttagacacggctatattccttactatagtgctctccccttcaggagagagcacgggactttggtattaacccttaggcttatttaccacgggcttcaattacggcctgagcaacgttactcggcgcttcatcatacttcaggaattccatagtgtaacttgcacgacctttggtcagagaacgcagctgagttgcgtatccgaacatttcagacagcggtacttcagcgtggatcttaacgccagtaacttcagattcctgacctttgagcataccacgacgacggctcaagtcaccgataacgtcaccggtgttctcttccggagtttctacttcaaccttcatgatcggctcaagcagaactggtttcgctttcttaaagccttctttaaaggcgatagaagcagccagtttaaacgccagttcagaggagtcaacgtcatggtaagaaccgaagtgcagacgaatacccatgtctactaccgggtagcctgccagcggacctgctttcagctgttcctggatacctttatcaacggccgggatgtattcgccagggattacaccacctttaatgtcgttgatgaactcgtagcctttcgggttactacccggctccagcgggtacatgtcgataacaacatgaccatactgaccacgaccaccagactgtttcgcgtgtttaccttcaacatcggtaactttctggcggatagtttcacggtaagcaacctgcggtttacctacgttcgcttcaacgttgaattcacgcttcatacggtcaacgatgatgtcgaggtgcagttcgcccatacccgcgatgatggtctggttagattcttcgtcagtccatacacggaaagacgggtcttctttagccagacggcccagagccagacccattttttcctggtcagctttggttttcggttcaactgcgatggagattaccggctcagggaattccatacgttccagaatgatcggcgcatccgggtcacacagggtgtcaccagtggttacgtctttcagaccgatagcagcagcgatgtcgcccgcgcgaacttctttgatctcttcacgtttgttagcgtgcatctgaacgatacgaccgaaacgctcacgtgcagctttcacggagttcagtacggtatcaccagagttaaccacaccggagtaaacacggaagaaggtcaggttaccaacaaacgggtcggtagcgattttgaacgccagtgcagagaacggctcgtcatcacttgcgtgacgttcagccggagtgtctttaccgtcgtccaggataccgttgatcgcaggtacgtcaaccggggatggcaggtaatcaattaccgcatccagcatcgcctgaacacctttgttcttgaacgcagaaccacaggttaccaggatgatttcgttgttcagaacgcgctgacgcagagcacctttgatttctgcttcagtcagttcttcaccacccaggtatttttccatcagctcttcagaagcttcagctgcggattcgatcaggttctggtgccattcgttagccagttcaaccatgtctgccgggatatcttcgtattcgaaggttacgccctggtcagcgtcgttccagttgatagctttcattttcaccaggtcaacaacaccggtgaaatgttcttcagcaccaatcgccagctgcagcggaaccgggttcgcgcccagacgggttttgatctggttaacaactttcaggaagttcgcacccatgcggtccattttgttaacgaacgcaatgcgcggaactttatatttgtttgcctgacgccatacggtttcagactgcggctgaacaccaccaactgcgcagtaaaccattaccgcaccatcgagaacacgcatggaacgttctacttcgattgtgaagtcaacgtgccccggggtgtcgatgatgttgatgcgatgcggctcatactgcttagccataccagaccagaatgcagtagtcgcagcggaagtgatggtaataccacgttcctgctcctgctccatccagtccatggttgcagcgccgtcatgaacttcaccgattttatggtttacaccggtgtagaacagaatacgttcggtagtagtggttttaccggcgtcgatgtgcgcactgataccgatgttacggtagcgtgcgatgggtgttgtacgagccatttgtttcctcgtttatcttttaggcgttcaatttaagtagcccaaagcgggctgcttactggaagcgcccgcctggtgactaaaactccgaagggataaccaacggtagtgtgcgaacgccttgttggcttcggccatacggtgaacgtcttcacgtttcttaactgcagtacctttgttttctgcagcatcagaaagttcgttcgccaggcgcagagccatggatttatcaccgcgtttacgagcagcttcaacgatccaacgcattgccagagcattacgacgaaccggacggacttcaactggtacctgataagtagaaccaccaacgcggcgagacttaacttctacagtcgggcgcacgttttcgagagctacttcgaatgcttccagttcagatttaccagagcgctgagccagggtctccagcgcgctgtatacgatagattcagcagtagattttttaccatctaccatcaggatatttacaaatttagccagcagttcacttccgaacttcggatccggcagaattttacgctgaccaatgacgcgacgacgtggcatggaaatactccgttgttaattcaggattgtccaaaactctacgagtttagtttgacatttaagttaaaacgtttggccttacttaacggagaaccattaagccttaggacgcttcacgccatacttggaacgagcctgcttacggtctttaacgccggagcagtcaagcgcaccacgtacggtgtggtaacgaacacccgggaggtctttaacacgaccgccacggatcaggatcacggagtgctcctgcaggttgtgaccttcaccaccgatgtaggaagtcacttcgaaaccgttagtcagacgaacacggcatactttacgcagcgcggagttcggtttacgaggagtggtagtatatacacgagtacatacgccacgtttttgcgggcatgcttccagcgcaggcacgttgcttttcgcaactttgcgagcacgtggtttgcgtaccagctggttaactgttgccattaaatagctcctggttttagcttttgcttcgtaaacacgtaataaaacgtcctcacacaatatgaggacgccgaattttagggcgatgccgaaaaggtgtcaagaaatatacaacgatcccgccatcaccaggccatctggctggggtgcttaaccgtaagtctgacgaaatcagtatagtcaatgagaatgatgtcgttgctaatttgaccagtcaaaccgcgggcaataaggtcttcgttcagggcatagaccttaatgggggcattacgcagactttcaaggtagcggttaccgtcaactgcggcagttacgccatcttgcaataatagcagttcgtctccttcactgagcagacgcagcagcgcagcaaaatccgtcagccagggactgcgatgtaatgtgtgcagcataaacgcctcaaaacctcaaaataacatcgtagttggcgagttcgcggcgtaaggcatctgcttcgagcggcgtggcttcgacaacaaagggtgtctgcggatctaacccgcgttcgcgcagactagccgcacaaacccagcactgttcaatgtcgtacagacccaacaatttaaaagtggcaatgtaatcacgcgccagcactgcatcgggcttttgtcctggcagcagctgaaaaacgccatcagctataaagaagacagccagatcgtcagttaatgcggaagttgccagtaaagcatctaaaccttcccggcctgcggctgtaccatgaggtgcagtagaaaaaacaaacgcaattcgtttcatcagaactgtaccaccctgtcacaggtcaggctggcttccgccagcgccccaagtccgcttaaggtaaatccctgctgaaggttactgctagccagccccagtcttccggcctccgtttcatcaacaacgccacggcgtaatgctgccgctacgcagatattcagcgccacaccatgttgcgcattcagttgttgccaggcccgtacgaggtcaaattcgtcacttgccggagaggtcaattggttagcgttatagaccccttcccgatagaaaaagacgctgcttaactcatggccatctgctatcagcgcctgcgcaaactgaaaagcactactcgcctgttgcgtaccgtatgctggcccggtcaccacgatggcaaaacgcattacttatcttgcccctggaaatcaccgctcttgaactggcggatgtagagatagacagtgtgtttggagatgttcaggcggtcagcaacctggttgatcgcatctttaatatcgaagatccctttctcgtagagattcagcacgatctgacgatttttggcgttattagaaacattgcgatcggcattcacttcttcgatggtgaactccagcgtttgggtaaccagatcttcaacagaagaggcaaagttgacgctactaccgacatccggggtttctggcggcacaaaggtgctcataatctggctgaagggaacatcaagattcatattgatgcacagcagaccaattacacgctgttcgcggttacgaatcgcgatagtcagggacttcattaatacgccgcttttggcgcgagtaaagtagcatttagaaacgctgctatccgctcccgtcatatcgtgcagcatacgtagcgccaggtcagtaattgggctaccaatcttccggcctgtatgttcaccgttagcaatgcgaatggcactacattttagatcctgcaaagagtgcaaaacgatttcacagtgggagccaataagcatcgctaacccgtccaccaccgcttcgtaggatttcagaatatcaaaatcggtctggtcgaaaggacgttgatccagtaaatccaactcactggtttcgttggttaaaaggctcctggacatgaaaaaaaacactccttttcaggagcctgtcgttaacttttcagggcaggctcattaatgatgcgggtaactaaattaatacagcggaggttccgctttccagcactaattatatccggcctgtaataaaaaaaccgccgcctggtcaggcggcggttcttaatgcttattttttagcagaatctgcggctttcgcatcagcttccggctttgcatcagccttcggcgctggtttcacatccagcagctctacgtcaaacaccagggtagaattcggtgggatccccggaacacccgctttgccgtaagccagttctggtggaataaccagtttgatcttaccgcctttcttgatgttcttcagaccttctgtccaacccgggataacaccgtccagacggaaagaaagcggttcaccacgggtgtaagagttgtcgaactctttaccgtcgatcagcgtacctttgtagttcactacaacagtatcgctgtctttcggtgcttcgcctttaccggcttctactacctgataaaccagaccagtactagaggttttcacacctttctctttggcaaatttctcgcggtactctttaccttttgcttcgttatcagccgcgtctttttccatcttcgcctgagcagaagacttcacgcgagcttcgaatgcttgtagagtctgttcgatctcttggtcggagagtttgcttttatcagcaaatgcatcctgaacaccagcgatcagctgatctttatccagtttgatgcccagtttttcttgttcttttagagagttttccatgtaacgacccaggctggcacccagtgcataagcacttttctgatcgtcatttttgaacgctgctttgctgtcagcagctgtagcaggttttgcagcttcagcagcaaaagtgattggtgcatgcagggcaacggccattgtggtcgccagcagcgttactttaaacagacttttcatccatatctccaggatcggggcatctcaccccagggttaactattatcagaagggtactataaagcgttgtcgaacaaatctacatacagacacgccctattatcatctattttcagactctttttgtttaaattagtttcgatgaccgcgaaatgagtgctgtctcgggcagcaaagttaagtagaatccgcggcgaccattcgacaaaagaggtgaatcatgcaggatttaagtttggaagcacgcctggcagagctggagagccgactggcttttcaggaaatcaccattgaagaactgaacgtcacggtgaccgctcatgaaatggagatggcgaaactgcgcgatcatctgcgtctgctgaccgagaagttaaaagccagccagccgagcaacatcgcgagccaggctgaagaaacgccaccgccacattattgaggcgtaaaaaaagcggggattccccgcttttttgtcactttttcggtattagtggcaaccgcaaccgccgttgcctttaccgccacagcagccttcgccaccgtgttcatgaccgtgatcgtggccatgaccgccgcagcaaccgtcgtggtcgtgatcgtggtggtgatcgtgcgcgccgtgaacgtgaccatgagccagttcttcttcagtcgcttcgcgaatcgccacaacttcaacgttgaatttcaggttctgaccggccagcatgtggttaccatcaaccacgacgtgatcgtcttcaaccgcagtgatttcaaccggtaccggaccctggtcggtttcagccaggaaacgcatacctacctgcagttcatcaacgcccataaatacgtctttaggaacacgttgcaccaggttttcgtcgtactgaccgtaagcgtcgttcgcgccaacagcgacatcaaatttgtcgccaacttcatgaccttccagcgccgtttccaggccagagatcagggaaccgtgaccatgcaggtagtccagcggcgcactcaccggagactcatcaaccaacacaccgtcttctgtacgtacctgataggccaggctgaccaccaggtcttttgctactttcatgatatctcctgagcatgggaagaatagtggcgcagattgtagcggaattctgcagccgtgtactcactagcttaaaaaaactcggcgcatatcgttagtccggatgaaaaatcccgatcacttgctcatctttgcgaacgtgatcgcgggcttctttgtctgcttctcgcatctgatgtccgcacttaacacattcaacaatatcaatattattttcgcgccacatcgccatactatcctgcgcctgacaggccgggcattttgcgcccgcaataaaacgttttcggattgccatctttaccctttactcaaattcatcccagccgtccagctggcgtcgttcttgttgcatttcacgctggaaaatctcttccagttcgcgtcgggcttccctggcgcgagaaatttgtacggtatcggcatgcattgggatgagctctcgcagcatccgcatatccaggcggcgaaaatgcagttgcgctcgctgtgcctgatgcggatgcatgccaagcgtgaccagcgtcttgcgccccagctctaacgcactggagaatgtttcacgggaaaactgcgtcacccctgcctgtaataactcatgcgcttccacacgtccgcgcgctcgcgcaagaatatgcaaatgcggaaagtgctgttggcatatttccaccagcttcatggtgtcttccggctcgttacaggtaatgacgatagactcagcggcctctgcacccgcagaacgtaaaagatcgacctgcgtggcgtcgccgtaataaactttgtagccgtatttacgcatcaggttaacggcgctgatatcccgctccagcacggtaatgcgcattttatttgccatcagcaaacgaccaatcacctgaccaaaacgcccgaagcccacgacaatgacctggggtttatcatcgttgacccacggtttttcgtcttcttcttccggtccgttaaactggcgggatagccatttatccaccagcttcatcagcaacggcgtggtcatcatggaaagcgtcaccgtcaccagcaacaacgccatctggtcgccctggaataagcgttgactagaagcggtagaaaagaggacaaaggcaaactcaccactctgactcaacacgccagcaaactgcatccgctcactgctacgcacgccatacaatcgcgccagcagatacagcacgagaattttcaccgccaccagcacaaccacgcttatcactacccacaacagatgggtataaagcaccccgaggttgagactcatgccgacagagataaagaacaaaccgagcagcaagcctttgaagggatcgatagccgtttccagttcatggcgatattcactttccgccagcagcacgcccgcaataaatgtaccgagcgccatgctcagccccagcgcatccataaacaatgcggaacccaacaccagcagcagcgtcgcggcggtgaacacttcccgcacgccagaagctgcaataaagcggaataccggacgcagtaaatagcgcccaccaatcagcatgccgacaaacgccagcaccttcatgccgaccttcatccagtcgaaatgttcgtctgcgctccccgccaacaacggcactaacgccagtgctgggattactgccagatcctgaaacagcagaacgctaaacccgagctggccggattcgctgcgattcatccctttctcacgcatcaattgcaacgccattgcagtactagacatcgcaaggccaatgccaccgaccaccgccgcctgccaggcgaaatccgtcagcatcaataatcccgccagcaacgccgcgcttaacagcacctgtgccgcgcctacgccaaaaatgctacgccgcagttgccaaagtttggagggattcaactcaaggccgatgataaacatcaggaataccacgccgagttcgctaaagtggaggatctcatcgacgtcgctaataaaccccagcccccacgggccaattgcaatccctgccagcaaatatcccaacacagcgccaatacccagccggcttgccagcggcaccgcagccaccgccgcgaagagaaacagcactcctgcgagtaaaaaatcggaaccttccatcagcggcctcctggagacagcggatttgccagccagtcaccgtaggctctggcgtggctcgccagctcctgtgcgctttgccgtctcgcccagtaaataatgatgggacttaaccaatgcatccggcacatgcccgccgccagttcaaaggggcgcagcacatcgctcatcgggtagcgattcagcgcgtcataacggtaagcactttccggctcgccggtggtaatcacgctacgccagtactttcccgccagttggtttcctcccggcccgctggcaaaaccacgacttaatacccggtccagccactctttcagtagcgccgggcagctataggtataaagaggatgctgaaagacaatcacctcgtgctcgcgcagtaatgcctgctcacgggggatatcaataaaaaaatcgggatagtgcgcgtaaaggtcgtgcacggtaacattgctgagctgcgtggccggtttaagcagtacccggtttgccacgctgtcctgagattccggatgggcatacagcagcaaaactttcgctggctgagacatcatccccctcccggtatggtttttgtgtatagtcgctgttttgggctaccattgcgcccggtgcggcagctcgcccatacattacattatcataatgataagttaacatagtctgaacatacggcaccttatgattgttttctccagcttacaaattcgtcgcggcgtgcgcgtcctgctggataatgccaccgccaccatcaaccctgggcagaaagtcggcctggtgggtaaaaacggctgtggtaaatctaccctgctggcattgctgaaaaatgaaatcagcgccgacggcggcagctacacctttccgggaagctggcaactggcgtgggtgaatcaggaaacgccggcgttaccgcaagcggcgctggaatatgtcattgacggcgaccgtgaatatcgtcaactagaagcgcagctacacgacgccaacgaacgtaacgacgggcacgccattgcgaccattcatggcaagctggatgctattgacgcatggagtattcgctcccgtgctgccagcctgctgcacggcctcggtttcagcaatgaacaactggagcgcccggtaagtgatttttccgggggctggcgtatgcgtcttaaccttgcccaggcgctgatttgccgtagtgacttgctgctgctcgacgaaccgactaaccacctcgatctcgatgccgttatctggctggaaaaatggctgaagagctatcagggcacgctgatcctgatctctcacgaccgcgacttcctcgatccgatcgtcgataaaattattcatatcgaacaacaaagcatgttcgagtacaccggcaactacagtagctttgaagtacagcgcgccacccgtctggcgcagcaacaagcgatgtacgaaagccagcaggaacgcgtagcgcatctgcaaagttatatcgaccgtttccgtgccaaagccaccaaagcgaagcaggcccagagccgcattaagatgctcgagcgtatggagctaattgcccccgcgcacgtcgacaacccgttccgctttagcttccgcgcgccggaaagcctgccaaatccgttactgaagatggaaaaagtcagcgcgggctatggcgatcgcattattctcgacagcattaaactgaacctggtgcccggcagccgtattggtctgttaggccgcaatggcgcgggtaaaagcacattaatcaaactgttagccggtgaacttgcgccagtcagcggtgaaattggtctggcgaaagggatcaaactcggctacttcgcccagcatcaacttgaatacctgcgcgccgacgaaagtcctattcaacatctggcacgtttagcgccgcaggagctggaacaaaaactgcgtgactacctcggcggctttggtttccagggcgataaagtaaccgaagaaacgcgccgcttctccggtggggaaaaagcccgcctggtgctggcattaattgtctggcagcggccgaatctgctgctgctcgacgaaccgactaaccaccttgacctcgacatgcgtcaggcactcaccgaagcattaatcgagtttgaaggcgcgctggttgtcgttagccacgaccgtcatttgctgcgttccaccactgacgatctctacctggttcacgatcgtaaagtcgaaccgttcgacggcgatctggaagattatcaacagtggttgagcgacgtacaaaagcaggaaaaccagaccgacgaagcgccaaaagagaatgcgaacagcgcccaggcacgtaaagatcagaagcgtcgggaagctgagctgcgtgcgcaaacccagccactgcgtaaagagattgcccgtctggaaaaagagatggagaagctgaacgcgcaactggcgcaggcggaagagaaactcggcgacagcgaactgtatgaccagagccgtaaagcggagttgaccgcctgcctgcaacagcaagccagcgccaaatccggcctggaagagtgcgaaatggcatggctggaagcccaggagcagcttgagcagatgctgctggaaggccaaagcaactgatggcgcagataacgacgaccgatgccaatgaattcagcagcagtgctgaattcatccccatgcgcggctttagcaattgtcatctgcaaaccatgctgccgcgtctgtttcgtcgtcaggtgaaattcaccccgtactggcagcggctggagttgcccgacggcgattttgtcgatcttgcgtggagtgaaaaccctgcacaggcgcaacataaacctcgtctggtggtgtttcacgggctggaaggcagtctcaacagcccttacgcccacggtctggttgaggcggcgcaaaagcgcggctggctgggcgtggtgatgcattttcgcggatgcagcggtgaaccaaaccgtatgcaccgcatttaccatagcggcgaaaccgaagacgccagttggtttttacgctggctgcaacgcgaatttggtcatgcgccaacggctgccgtcggctatagcctcggcggtaatatgctggcctgtttgctggcaaaggaaggcaatgatctcccggttgatgcggcggtgattgtctctgcgccgtttatgctggaagcctgtagctatcatatggaaaagggcttttcccgcgtttatcagcgttacttgctgaacctgttaaaagccaatgccgcgcgcaagctggcagcctaccccggaacgctgccgattaatctcgcgcagttaaaaagcgtacgtcgcatccgtgaatttgacgatctcatcaccgccagaattcacggctacgccgacgctatcgactattatcgtcagtgtagcgccatgccgatgctgaaccggatcgccaaaccgacgctgattattcacgccaaagacgatccgtttatggatcatcaggtgatcccgaaaccggaaagtctccccccgcaggtggagtatcaactgactgaacatggcggtcatgttggctttattggcggtacattacttcatccgcaaatgtggctggagagtcgcattcctgactggttaacaacgtatctggaggcgaaaagttgttgatattaacgtatctggaggcgaaatcatgttgattccgtggcaagacctctcccccgaaacgctggaaaatttaattgaaagctttgtgttacgtgaaggcaccgattatggtgaacatgagcgtacacttgaacagaaagtcgccgacgtcaaacgccagctacagtgcggagaagcggtgctggtatggagcgagctgcacgaaacggtcaatattatgccgcgcagtcagtttcgcgaataacctgcaaccgtcggcggacgagataataatgatagctaagtcatggagttactatgtctgccaaacatccggtcattgcggtaacaggatccagcggcgcggggaccaccaccaccagcctcgcgtttcgtaaaatattcgcgcagttaaatctgcatgcagctgaggtggaaggcgacagttttcaccgttacacccgcccggaaatggacatggcgatccgcaaagcgcgcgacgccgggcggcatatcagctacttcggccccgaggctaacgacttcggcctgctggaacaaaccttcattgaatacggtcagagcggcaaagggaaatctcgcaaatatctgcatacctacgacgaagccgtaccgtggaatcaggtaccggggacattcaccccctggcaacctttaccggaacccactgatgtactgttttatgaaggtttacacggcggcgtagtcacgccacagcataacgttgcgcagcatgtggacttactggtcggcgtggtgcctatcgttaaccttgagtggattcaaaaactgatccgcgacaccagcgagcgcgggcacagtcgagaagcagtgatggacagtgtagtgcgtagtatggaagactatatcaactacatcacaccgcagttttcccgcacccatcttaacttccagcgcgttcccaccgtcgacactagtaacccgttcgcggcaaaaggtatcccgagcctcgatgaaagctttgtggtgatccattttcgtaatctggaagggatcgatttcccctggctgctggcgatgttgcaaggcagtttcatttcccacatcaatacgttagtggtaccgggcggcaaaatgggtctggcaatggaattaattatgctgccgctggtgcaacgattgatggaaggaaagaaaatcgagtaactctgctattacgccggataaaatactatccggcttcacaacgggatagttaagtcacgcggcaaccacttcatagctgtgagtaatattcaccgctttttccagcatcaacgccacactacaatatttctcggcagagagatcaaccgcacgcgcaaccgctgcgtctttcaggtcgcgaccggtgacgataaaatgcagattaatgtgcgtaaacaggcgtggtgcctcttcgcggcgttcagaggtcaattttacttcacaatcgaccacatcctgacgccctttttgcaggatgctaaccacatcgatggcactgcaaccacccgccgccatcaacaccatttccatcggacttggtgctttatcgccactgttgccgtccattaaaatctgatgaccagaggcggattcgcccagaaaagttaacccttcgacccacttcactcgcgcttgcatttttgctactccactgcgtcaattttcctgacagagtacgcgtactaaccaaatcgcgcaacggaaggcgacctgggtcatgctgaagcgagacaccaggagacacaaagcgaaagctatgctaaaacagtcaggatgctacagtaatacattgatgtactgcatgtatgcaaaggacgtcacattaccgtgcagtacagttgatagccccttcccaggtagcgggaagcatatttcggcaatccagagacagcggcgttatctggctctggagaaagcttataacagaggataaccgcgcatggtgcttggcaaaccgcaaacagacccgactctcgaatggttcttgtctcattgccacattcataagtacccatccaagagcacgcttattcaccagggtgaaaaagcggaaacgctgtactacatcgttaaaggctctgtggcagtgctgatcaaagacgaagagggtaaagaaatgatcctctcctatctgaatcagggtgattttattggcgaactgggcctgtttgaagagggccaggaacgtagcgcatgggtacgtgcgaaaaccgcctgtgaagtggctgaaattagctacaaaaaatttcgccaattgattcaggtaaacccggacattctgatgcgtttgtctgcacagatggcgcgtcgtctgcaagtcactagtgagaaagtgggcaacctggcgttcctcgacgtgacgggccgcattgcacagactctgctgaatctggcaaaacaaccagacgctatgactcacccggacggtatgcaaatcaaaattacccgtcaggaaattggtcagattgtcggctgttctcgtgaaaccgtgggacgcattctgaagatgctggaagatcagaacctgatctccgcacacggtaaaaccatcgtcgtttacggcactcgttaatcccgtcggagtggcgcgttacctggtagcgcgccattttgtttcccccgatgtggcgcagactgatttatcaccccgatatcaactatgcacttcgacaaacgctggtgctatgtttgcccgtggccgttgggttaatgcttggcgaattacgattcggtctgctcttctccctcgttcctgcctgttgcaatattgcgggccttgatacgcctcataaacgttttttcaaacgcttaatcattggtgcgagcctgtttgccacctgtagcttgctgacacagctactactggcaaaagatgttcccctgccctttttgctgaccggattaacgctggtacttggcgtcactgctgagctggggccattgcacgcaaaattgcttcctgcaagcctgctcgccgccatttttaccctcagtttggcgggatacatgccggtctgggaaccgttgctcatctatgcgttgggcactctctggtacggattgtttaactggttttggttctggatctggcgcgaacaaccgctgcgcgagagtctaagtctgctgtaccgtgaactggcagattattgtgaagccaaatacagcctgcttacccagcacaccgaccctgaaaaagcgctgccgccgctgctggtgcgccagcaaaaagcggtcgatctaattacccagtgctatcagcaaatgcatatgctttccgcgcaaaataatactgactacaagcggatgctgcgtattttccaggaggcgctggatttacaggaacatattagcgtcagtttgcatcagccggaagaggtgcaaaagctggtcgagcgtagccatgcggaagaagttatccgctggaatgcgcaaaccgtcgccgctcgcctgcgcgtgctggctgatgacattctttaccatcgcctgccaacgcgttttacgatggaaaagcaaattggcgcactggaaaaaatcgcccgccagcatccggataatccggttgggcaattctgctactggcatttcagccgcatcgcccgcgtgctgcgcacccaaaaaccgctctatgcccgtgacttactggccgataaacagcggcgaatgccattacttccggcgctgaaaagttatctgagtctaaagtctccggcgctacgcaatgccggacgactcagtgtgatgttaagcgttgccagcctgatgggcaccgcgctgcatctgccgaagagctactggatcctgatgacggtattgctggtgacacaaaatggctatggcgcaacccgtctgaggattgtgaatcgctccgtgggaaccgtggtcgggttaatcattgcgggcgtggcgctgcactttaaaattcccgaaggttacaccctgacgttgatgctgattaccaccctcgccagctacctgatattgcgcaaaaactacggctgggcgacggtcggttttactattaccgcagtgtataccctgcaactattgtggttgaacggcgagcaatacatccttccgcgtcttatcgataccattattggttgtttaattgctttcggcggtactgtctggctgtggccgcagtggcagagcgggttattgcgtaaaaacgcccatgatgctttagaagcctatcaggaagcgattcgcttgattcttagcgaggatccgcaacctacgccactggcctggcagcgaatgcgggtaaatcaggcacataacactctgtataacagtttgaatcaggcgatgcaggaaccggcgtttaacagccattatctggcagatatgaaactgtgggtaacgcacagccagtttattgttgagcatattaatgccatgaccacgctggcgcgggaacaccgggcattgccacctgaactggcacaagagtatttacagtcttgtgaaatcgccattcagcgttgtcagcagcgactggagtatgacgaaccgggtagttctggcgatgccaatatcatggatgcgccggagatgcagccgcacgaaggcgcggcaggtacgctggagcagcatttacagcgggttattggtcatctgaacaccatgcacaccattagcagcatggcatggcgtcagcgaccgcatcacgggatttggctgagtcgcaagttgcgggatagcaaggcgtaatgcaggctaaaccatcggataaggcattcacgccgcatccgacatcttttgcctgatgcttcgtatttacgccccaaccaccttcgccaccgcgtgggcgaaacgttgcatcccttcatcgatatccgcatcttccaccaccaggctcggtgcaaaacgcatcacatccggtccggcattcagcaccattacgccagcctctgcgcccgcatacaggaaatcacgcgcccgacctttgtactgtggtttcagctctgcgccaatcaacagccccataccgcgaatatcgctaaatacatcgtactgctgatcgatcttctgcagatggtcaacaaaacgctggcgtttcgcctgaatgccttccagcacttcaggggtattgatgatatcaaacgccgcccccgctactgcacaggccagaggattaccgccgtaggtggaaccgtgagaaccaggatgaaacgcagaagcaatttccgccgtggtcagcatggcgctaatcgggaagccgccgcctaacgctttcgcagaggtcagaatatccggcgtaacgccgtagtgcatgtaagcaaacaaatcgccggtccgccccatcccgcactgcacttcatcaaacaccaataatgcctgatgttgatcgcacagctcgcgcaagccctgcaaaaactctggcgtcgctgccgtcacaccgccctcgccctggatcggctcaaccaccaccgcacaggtgtgatcatccatcaccgctttcactgcatggagatcgttaaagggaacgtggatgatgtctgccggtttcggcccaaagccgtcggaatattttggctgcccacccacgctaacggtaaacaggctgcgaccatgaaaagcgttatggaaggcaataattttggttttgaacgggctatgacgcacacaggcgtaatggcgtgccagtttaaaggcggtttcgttagcttccgtgccggagttcataaacaccacgcgttcggcaaacgttgcctcaatcagtttacgcccaagacgcagcgccggttcattggtgaaaacgttactgatatgccacagagtttcgccctgggtttttaacgcgttcaccagcgcaggatggcaatggcccaacgccgtaactgcaatgccacccgcgaaatcgacatactccttgccttgctgatcccagattcggctgccctgaccttttaccggaataaactctgccggagcataaatcggcaggatcacttcatcgaaagtcgcgcgtgtaattgctgtttgttcaattgccatctcatgatcaccctgttacgcataaacaaatgtgaaattataaccacaaaatatgcataaaaaatcactaaatggcaatcagaaatcagcgatgcaggaaattagccagcagttgatgtccttgttcgctaagaatactttctggatggaactgcacaccttccagatcccactggcgatggcgaatccccataatctctcgggtttcgctccaggccgtcacgtcaaagcacgctggtaaactgtcaggttccaccaccaggctatggtagcgtgtcacggtaagtggatttgccagcccccgaaatacgccctcaccgttatgtgtaatcgggctggttttgccgtgcatgacctttgcggcgcgcacaactttaccgccaaatgcctgcgccattgcctgatgaccgaggcagacgccaagaatcggcaagcgcccggcatagtggcgaataacgtcaagggagatcccggcttcatctggcgtacaggggccaggactgatgacaattttttgtggtttaagggcgtcgatatccgccagcgtcaacgcatcgttgcgcttaaccagcacatccgcccccagttcacaaaagtactggtagaggttccaggtaaaagaatcgtagttatctataagcaggatcatggcggctccggtacaaaagaaccgcgctattttactcagattccccggcttcgcttaccactttgctaaatatcatctgcagtgcggtgagatcccccattgccccactctgatttgcctgattccaggcctctttttcgataccctgccagctcagttgatatccggcatgaatcgccagttgctcgaagaagatccgctgtgccagaccacttcccacccggaagggatgcagcacgttgatttcacaatagtaatgcgccagccgctcgacgaacttcgctttctccaggccaaccagataaccttcttcctccagatcctgcatcagggcattgccctctttttcgatataagcaaagtggcagaacggcgtatcaccctgataaatatcaacttcacgcagttgccctgcccagtcgaaaatatcctgatacagctggcgatggatagttcgcaaatgcggtaaaccgcgcaccagcggaccaagctcaatggtcgcagcacgcagcgccgtcatttcgtaagcggcctgttccagccgctgctgctggcggatgttcagccggttacgcatgatatcaaggcctggataaagatacggatcgcgcccttcgccgaatttatcgctcatagtgactcctcagctcttcaaggcgcgctaaagcctctgcggcagtaagagtgactaaaggcatctcgacgccttcaagacggcgactggcctgaaaattacgattacgctgaagctcccagagacgggacttttgcttatcggtgagtttcttcacttgatgcctccctgaacgtgtccatttgccacaagtataagcggcaaatccgggttacgccgggagagcagaagcgcgggcaagattgcccgcgcgagaaatcattacggcaggactttagcggaaaggataactaccggtttactcggcacattctggtacggaccaacgtcatgagtcggcacctgggaaatcttatcggcaacgtccatgcctttcaccactttaccaaataccgcgtaaccgaaatcacgctgaccatggtcaaggaaggcgttatcggcaacgttgataaagaactggctggtggcgctgtctttgtcagcggtacgtgccatcgcgatggtgccacgcgtgttgcgcaggccgttatcggcttcatttttgattggcgggtttggttttttctgctgcatctgctcggtgaaaccgccgccctgaatcataaagccaggaatgacgcggtgaaaggtagtgttgttataaaaaccgctgttcacataatcgacaaagttttgcacagacactggcgctttttgtttatccagctccagttcgatgttaccagcactggttgtcaacaatacgtgcgggtcccctttcgctgccattgctgcgggagaaagagcagaaagagcgaaaacagcagccatcgccgccagggtgcttttgaacatgagatttccttaacaaacagagcagaaaaaaagcaagtgaagagattctaaatagccttcaagaacaaggccatccctttacctaattttacgtatctgaaatatatgtaacctgacgatcactttttattccgtgatcaaaatcacctcttaaaatgcaatttagcaaccgattgcaataaaacatttaaacagatcacaaaatcacctaaaatcgcccgctcgcggcatatcccgctatgccattttatttttgaacgcaggccaatcatgactaacagcaatcgcatcaagctcacatggattagctttctctcctacgcactgactggtgcgttggttattgtcaccgggatggtgatgggaaatatcgccgattatttcaatctgcctgtttccagtatgagtaataccttcaccttcctcaacgccggcattttaatctctatcttcctcaacgcctggctgatggaaatcgtcccgttgaaaacgcagttacgttttggctttctcctgatggtgctggcggttgccggtttgatgttcagccacagcctggcgctgttcagcgcggcgatgttcattctcggggtggtcagcggcatcaccatgagcattggtacattcctggtaacacaaatgtatgaagggcgtcagcgcggttcccgcctgttatttaccgactccttcttcagtatggctgggatgattttcccaatgatcgccgcgtttctactggcgcgcagcattgagtggtactgggtttatgcctgcatcgggctggtgtatgtcgctatttttattctgaccttcggctgtgagttcccggcgctgggcaaacatgcgccaaaaacggatgctccggtagagaaagaaaagtgggggatcggcgtactgtttctctctgttgcggcgttgtgctacatcctcggtcagttaggttttatctcctgggtgcctgagtatgccaaaggcctgggcatgagcctgaacgacgcgggcacgctggtgagtaacttctggatgagttacatggtcggcatgtgggcgttcagctttattcttcgcttctttgatttgcaacgcattctgaccgtactggctggtctggctgcgattctgatgtacgtctttaacaccggaacaccagcacatatggcgtggagtattctcgctctgggcttcttctccagcgcgatctataccaccatcatcaccctgggtagtcagcagaccaaagtaccgagcccaaaactggttaactttgtcctgacctgcggaaccatcggtactatgttgacctttgtggttaccggcccgatcgttgaacatagcggtccgcaggcggcactgcttacagcaaacggtctgtacgctgtcgtctttgtgatgtgcttcctgttaggtttcgtcagccgtcaccgtcagcataacaccctgacctctcattaattgctcatgccggacggcactatcgtcgtccggccttttcctctcttcccccgctacgtgcatctatttctataaacccgctcattttgtctattttttgcacaaacatgaaatatcagacaattccgtgacttaagaaaatttatacaaatcagcaatatacccattaaggagtatataaaggtgaatttgatttacatcaataagcggggttgctgaatcgttaaggtaggcggtaatagaaaagaaatcgaggcaaaaatgagcaaagtcagactcgcaattatcggtaacggtatggtcggccatcgctttatcgaagatcttcttgataaatctgatgcggccaactttgatattaccgttttctgtgaagaaccgcgcatcgcttatgaccgcgtacacctcagctcttacttctctcaccacaccgccgaagagctgagcctggtgcgcgaaggcttctacgagaaacacggcatcaaagttctggtcggcgaacgcgctatcaccatcaaccgtcaggagaaggtgattcactccagcgccggacgtaccgttttttatgacaagctgatcatggcaaccggttcctacccgtggatcccgccaatcaaaggttctgatactcaggactgctttgtctatcgcactattgaagacctcaacgccattgaatcctgcgcccgtcgcagcaaacgcggtgccgttgttggtggcggcctgttaggtctggaagccgcaggcgcgctgaaaaacttaggtattgaaacccacgttatcgaatttgcccctatgctgatggcagaacagcttgatcagatgggcggcgagcagctgcgtcgcaaaatcgaaagtatgggcgtgcgcgttcacaccagcaaaaacacccttgagattgtgcaggaaggtgttgaagcgcgtaaaaccatgcgttttgccgacggcagcgaactggaagtcgactttatcgtcttctctaccggtatccgtccgcgcgataagctggcaacccagtgtggtctggacgttgctccgcgtgggggtattgtcattaatgattcctgccagacttccgatccggatatctacgccatcggtgaatgcgcaagctggaacaaccgtgtatttggtctggtagcacctggctacaaaatggcgcaggtcgccgttgaccatattctcggtagcgaaaacgcctttgaaggtgctgaccttagcgccaagctgaaactgctgggcgtagacgtaggcggtattggtgatgcgcacggtcgcacgcctggcgcacgtagctacgtttacctcgacgaaagtaaagagatctacaaacgcctgattgtcagcgaagacaacaaaaccctgctcggtgcggtactggtgggcgataccagcgactacggtaacctgctgcaactggtgctgaacgctatcgaactgccggaaaacccggattccctgatcctgccagcacacagcggtagcggcaagccgtctatcggtgttgataaactgccggacagcgcgcaaatctgctcctgcttcgacgtcaccaaaggtgatctgattgctgccatcaacaaaggctgccacacagttgcggcgctgaaagctgaaaccaaagcgggtactggctgcggtggctgtatcccgctggtcactcaggtactgaacgcggaactggcgaaacagggcatcgaagttaacaacaacctgtgcgaacactttgcttatagccgtcaggaactgttccatttgatccgcgttgaaggcattaaaaccttcgaagaactgctggcgaaacacggcaaaggctacggttgtgaagtttgtaaaccaaccgtcggtagcctgctggcctcctgctggaacgaatacattctgaagccggaacatactccgctgcaggattctaacgacaacttcctcgctaacatccagaaagacggcacctacagcgtgatcccgcgttctccgggcggtgaaatcaccccggaagggctgatggcggtaggtcgtatcgcgcgtgaatttaatctctacaccaagatcactggctcccagcgtctggcgatgtttggcgcacagaaagacgatctgccggagatctggcgtcagctgattgaagccggcttcgaaaccggtcatgcctatgcgaaagcactgcgtatggcgaaaacctgcgtgggtagcacctggtgccgctacggcgttggcgacagcgtcggcctcggcgtggaactggaaaaccgctacaaaggcatccgtacgccgcacaaaatgaagttcggtgtctccggctgtacccgtgaatgtagtgaagctcagggtaaagacgtgggtattatcgccactgaaaaaggctggaacctgtatgtttgcggtaacggcggcatgaaaccgcgtcatgcggatctgctggcggcggatatcgatcgcgaaacgctgatcaaatatctcgaccgcttcatgatgttctacatccgtactgccgacaaactgacgcgtaccgcaccgtggttagaaaacctcgaaggcggcatcgattacctgaaagcagtgatcattgacgacaaactggggctgaacgcacatctggaagaagagatggcgcgcctgcgtgaagcggtactgtgtgagtggactgaaacggtcaatacgccgtctgcgcagactcgcttcaaacacttcatcaacagcgacaagcgtgacccgaacgtgcagatggtgccagagcgcgaacagcaccgtccggcaacgccgtatgaacgtatcccagtaactctggtggaggacaacgcatgagccagtggaaagacatctgcaaaatcgatgacatcctgcctgaaaccggcgtctgcgcgctgttaggtgacgagcaggtcgcgattttccgcccgtatcacagcgatcaggtgtttgcgatcagcaacatcgacccgttcttcgagtccagcgtgctgagtcgcggactgattgcggaacaccagggcgagctgtgggtcgccagcccgctgaaaaaacagcgttttcgcttaagcgacggcttgtgcatggaagacgaacagttttccgtcaaacattacgaagcgcgagtgaaagacggcgtggtgcagctgcgcggttaatgttttaacgggaggcgcaatgcctcccctttttgcatggtcctgtaataatcttcggtatattgcaggacattttttaaactttttgttttattttttgtttttattttttaaaggataatcaaatgtttacagacactattaataagtgtgcggctaacgctgcgcgcattgcacgcctgagcgcaaataacccgctcggcttttgggtcagctccgccatggcgggcgcgtatgtgggtcttgggatcatcctgattttcacgctcggtaatttgctcgatccatccgtacgccctttggtgatgggcgcgacctttggtatcgccttaacgctggtgattatcgccggttctgaactgttcaccggacacaccatgttcctcacctttggggtaaaagcgggcagcatcagccacgggcaaatgtgggcaatcctgccgcaaacctggctgggtaacctggtcggttccgtcttcgttgccatgctctatagctggggcggcggtagcctgctgccggtagataccagcatcgttcactccgtcgcgctggctaaaaccactgcaccggcaatggtactcttcttcaaaggtgcattgtgtaactggctggtttgcctggcaatctggatggcgctgcgcactgaaggggcggcgaaatttatcgctatctggtggtgtctgctggcatttatcgcgtccggctacgagcactctatcgctaacatgacgctgttcgcgctctcctggttcggcaaccacagcgaagcctacacgctggcgggtattggtcataacctgctgtgggtgacgctgggtaatactttaagtggtgccgtattcatgggattgggttattggtatgctacgccgaaagcgaatcgtccggttgcggacaaatttaatcaaactgaaacggctgccggttaattactaaggggtttttacgtggatcatttgcctatattttgccaattacgcgatcgcgactgtctgattgtcggcggtggtgatgtcgcggaacgcaaagcaaggttgctgttagacgcaggcgctcgcttaacggtgaatgcattagcgtttattccacagttcaccgcatgggcagatgcaggcatgttaaccctcgtcgaagggccatttgatgaaagccttctcgacacctgctggctggcgattgcagcgacggatgatgacgcgcttaaccagcgcgtcagcgaagccgctgaagctcgtcgcatcttctgtaacgtggtcgatgcgccgaaagccgccagctttattatgccgagcattattgaccgcagtccgctcatggtagcggtctcctctggcggcacctctccggttctgacacgcctgttgcgcgaaaaacttgaaagtctgctgccgttacatctgggccaggtagcgaaatacgccgggcaattacgcgggcgagtgaaacaacagttcgccacgatgggtgagcgtcgccgtttctgggagaaattgttcgttaacgaccgcctggcgcagagcctggcaaacaacgatcagaaagccattactgaaacgaccgaacagttaatcaacgaaccgctcgaccatcgcggtgaagtggtgctggttggtgcaggtccgggcgatgccgggctgctgacactgaaaggactgcaacaaattcagcaggcagatgtggtggtctacgaccgtctggtttctgacgatattatgaatctggtacgccgcgatgcggaccgtgttttcgtcggcaaacgcgcgggataccactgcgtaccccaggaagagattaaccagatcctgctgcgggaagcgcaaaaaggcaaacgcgtggtgcggctgaaaggtggcgatccgtttatttttggccgtggtggcgaagagctggaaacactgtgcaacgcgggtattccgttcagcgtggttccgggtattaccgcagcttctggttgctctgcctatagcggtattccactcacgcatcgcgattatgcccagagcgtacgcttaattaccggacacttaaaaaccggtggcgagctggactgggaaaacctggcggcagaaaaacagacgctggtgttctatatggggttgaatcaggccgcgactattcagcaaaagctgattgaacacggaatgccaggcgaaatgccggtggcaattgtcgaaaacggtacggcagtcacgcagcgcgtgattgacggtacgctcacacagctgggagaactggcgcagcaaatgaacagtccaagcctaattattattggtcgggttgttggcctgcgcgataaactgaactggttctccaaccattaatttaacccgggccagagaattctggccttcttaatgactctttttatatattcagcaaataaaacatagccccttaataaatattatctgctaatgggttatattcaccgttacagcgacttacaaaattaagtcattcgctcactgacgccaattaaatattcctgtatcgttcttaacgagcagtctgcttatattcatataatcaatgaatattaattaatatataatacatagggaatgtaaatgaacaaatttattaaagttgcactggtaggtgcagtactggctacgttaactgcatgtactggtcatattgaaaaccgtgataagaactgctcttacgactacctgctgcacccggcaatttctatttctaaaatcattggcggttgcggtcctactgcacagtaagtctctgacagaaatcggctaacaccggtttaattgcccgacgccctctggattttccgagggcgtatttgtttctatgtccttcttgcccccgcccgtaaaaatattttcactttaaattcaatttgataactacatccattagccacagcgcgatcctgtgcgaaattttgtgatcttcctccacattacataacatcatatgttgttatattcatcatgcattgtcatgttaccttttaaatgactgcaaactctcccctacaacgtattggacaagaaaaaggtatcgctatgggaagccaggaactccaacgcaagctcggattttgggccgttcttgcaatcgccgtcgggacaaccgtcggctccggtatttttgtatctgtgggtgaagtggcaaaagcagcgggcacgccgtggcttacggtgctcgcgtttgtcattggcgggttaattgtgatcccgcaaatgtgcgtctatgcggaactatccaccgcttatccggaaaatggcgcagattatgtttatctgaaaaatgccggaagccgaccgctggctttcctctccggctgggccagcttctgggccaacgatgcgccgagtttgagcattatggcgctggcgattgtcagcaatcttggctttttaacgcctatcgatccgttgctcggtaaatttatcgccgccggattaattatcgcctttatgttgctacacctgcgctccgttgaaggcggcgcagcgtttcagacgctaattaccatcgccaaaattatcccgttcactatcgtcattggccttgggatcttctggtttaaagcggagaattttgccgcccctaccaccactgcgattggcgcaacgggcagctttatggcgctgctggcggggatctctgccaccagttggagctataccggcatggcctctatctgttatatgaccggcgaaattaaaaaccccggaaaaaccatgccacgagcgctgattggttcctgtctgctggttctggtgctctacaccctgctggcgctggtgatttccggcctgatgcccttcgacaaactcgccaattctgaaacgccgatttccgacgccctgacctggatccccgcactcggcagcaccgctgggatctttgttgccatcacggcgatgatcgtcattcttggtagcctttccagctgcgtgatgtaccagccgcggctggaatacgcgatggcgaaagacaacctgttctttaaatgcttcggccatgtgcatccgaaatacaacacgccggatgtctccatcatcctgcaaggggcgctggggatcttcttcatcttcgtttccgatctcaccagcctgctgggttatttcaccctggtgatgtgtttcaaaaataccctcaccttcggctccatcatctggtgtcgtaaacgcgacgattacaaaccgctgtggcgtactccggctttcgggctgatgaccaccctcgccattgcgagtagcctcattctggtcgccagtacctttgtctgggcaccgattcccggccttatctgcgccgtcatcgttattgctactggtctgcctgcttacgccttctgggcgaagcgtagccgccagctcaacgctttgagctaatgttatctggagaaaataaaatgttggatattgataaaagcaccgtggactttctggtcaccgaaaatatggttcaggaagtggaaaaagttctcagccatgacgttccgctggtgcacgccatcgtggaagagatggtgaagcgcgacattgatcgtatttatttcgttgcctgcggaagcccactcaacgcggcgcaaacggcgaaacatctggcggatcgcttttccgatcttcaggtctacgccatttccggctgggagttctgcgataacaccccgtatcgcctcgacgatcgttgcgcagtaattggcgtttctgactacggtaaaaccgaagaggtaatcaaagcgctggagctgggccgggcctgcggcgcactcactgcggcgttcaccaaacgcgcggatagcccgattaccagcgcggcggaatttagcattgattatcaggccgactgtatctgggaaattcacctgccgctctgctacagcgtggtgctggagatgatcacccgcctcgcgccgaacgcggaaatcggcaagatcaaaaacgatctcaagcagttgccgaatgcgctcggtcatctggtacgcacctgggaagaaaaaggccgccagcttggtgaactggccagccagtggccgatgatttataccgttgctgcgggtccgctgcgtccgctgggttacaaagaaggcattgtaacgctgatggaatttacctggacgcacggctgcgtgattgagagcggagagttccgccatggcccgctggagattgtcgaaccgggcgttccgttcctgttcctgctcggcaatgatgaaagtcgccacaccaccgaacgcgccattaactttgttaaacagcgtactgacaacgtgatcgtcatcgattacgccgaaattagccaagggctgcacccgtggctggcaccgttcctgatgttcgtgccaatggagtggctctgctactacctgtctatttacaaagatcacaacccggatgaacgccgctattacggtggtctggtggaatattaatccctctcccggcccggcaacgggccggatttacgcaaggagttacccgatgaaaacaggtatgtttacctgcggccaccagcggctgcctattgaacacgcatttcgtgatgcaagcgagctgggttacgacggcatcgaaatttggggcggtcgcccgcacgcgttcgcgccggacttaaaagcgggcggcatcaaacaaatcaaggcgctggcgcagacgtatcagatgccgattatcggctatacgccagaaaccaacggctatccgtataacatgatgctgggcgatgaacatatgcgtcgcgaaagcctcgacatgatcaagctggcgatggatatggcaaaagagatgaacgcgggttatacgctgatttccgcggcccacgcgggctatctcacgccacctaatgttatctggggacggctggcagagaacctaagcgaactgtgtgagtacgcggaaaacatcggcatggatctaatcctcgaaccgttaacgccgtatgaaagcaacgtcgtgtgtaatgctaatgatgtgcttcatgcgctggcgctggtgcctagcccgcgcctgttcagcatggtcgacatttgcgcgccgtatgtccaggcggaaccggtgatgagttatttcgacaaactgggcgataaattacgtcatctgcatattgtcgacagcgacggggccagcgacacgcattacattcctggagaaggcaaaatgccgctgcgggaactgatgcgcgatattattgagcggggctatgagggttactgtacggtggagctggtgacgatgtatatgaacgagcccagactctatgcccgccaggcgctggaacgctttcgcgcgctgctgccggaggatgagagatgaaaaccctggcgacaatcggcgataactgcgtcgatatctacccgcaactgaataaagcgttttctggcggtaatgcggtcaatgtggcggtgtactgcactcgctacggcatacagccgggatgcattacctgggtgggtgacgatgactacggcacaaagctgaagcaggatctcgcccgcatgggcgtcgatatcagccatgtccatacgaaacacggcgttaccgcacaaactcaggtggaactgcacgacaatgatcgcgtttttggcgactacaccgaaggcgtgatggccgactttgccctgagtgaagaggattacgcctggctggcgcagtatgacattgtgcacgcggcaatctggggacatgcggaagacgcattcccacagctgcacgctgcgggcaaacttaccgctttcgacttctccgacaagtgggacagcccgctctggcagacactggtgccgcatctcgattttgcctttgcctccgcaccgcaagaagacgaaacgctgcgtctgaagatgaaagcgattgttgcccgtggcgcaggaacagtgattgtcacgctgggtgaaaacggcagcattgcctgggatggcgcgcagttctggcgtcaggctcctgaaccggtgacggttatcgacaccatgggtgccggagatagcttcattgccggattcctttgcggctggtctgcggggatgacattaccgcaggcgatagcgcagggaacggcgtgcgcggcgaaaaccattcagtaccacggtgcctggtaagtataacgttggcgtgagcatcttcacgccaacgtgctgttacttgccggaaaacgaccctataatccgagtaattcattctttatttcagggtcgattatgagtgctacggaccgctactctcatcaactcctctacgctaccgtccgccagcgactgctggatgatatcgcgcagggggtttaccaggcgggcaacagatccctaccgaaaacgagctttgtacacaatataacgtcagccgcattaccattcgcaaagccatcagcgacttagtggcagacggcgtactgatccgctggcagggaaaaggcacctttgtacaaagccagaaagttgaaaacgccctgcttactgtcagtggttttaccgattttggcgtcagtcaaggcaaggcgacgaaagagaaagtgatcgaacaggaacgggtcagcgccgcgccgttttgcgaaaagctgaacatccccggaaacagcgaagtgttccatctctgccgggtgatgtatctcgataaagagccgctgtttattgatagtagttggatcccgctgagccgttatcctgactttgatgagatttacgtcgaaggaagctccacctatcagttatttcaggagcgttttgacacgcgagtggtcagcgacaaaaagaccatcgatatctttgccgccacccgcccgcaggcaaaatggctgaaatgcgaactgggcgaaccgttgtttcgcatcagcaaaatcgcctttgatcagaatgacaaaccggtgcacgtctccgaactcttctgccgcgccaatcgcatcaccttaactattgataataaaagacattaaccgtaggccggataagatgcgccagcatcgcatccggcgatgctggcgcgttgaattttacatcccgtacgttcccctcaccctaaccctctccccaaaggggcgaggggaccgttcagtacggaatttagcttgacggtgctatccagcattaaatactggcaatactctcacgcaaaatccgcagcaccgtctcttcaccgctgcgattcgggttaatgcgaatcgcacaatgttcactttgtggattcgcctggcgaaacgttccggaaaggcgataaaagagcggcgggatttcatatttgctctctgcacccaccgggtaaggcaaggcaccgcgcttttgcgcctcttccagcactctggcggcaatcggctgatgaaactcgacaatcaacaccttgctctgcgcattagcaatcaccgcgcttttcacttccggcaccgcaccaccgttaagcaaagccagcaaccgttcagatacccctgcctgcaccgcgtgcatcactggcgcaaacaccagaccacgcaatacttccagcgcctgtgcgccctggatctggctaccgccggagtaaagcgtggcgcgaatacggttgataacatcagcatcgccgaccactgcaccaacaccctctggcccaaatagcttgaagcaggaaaatgtgctgacattcgcgccgcattcacagccgattcgagccaccttcatcaccgcatagttgtcatcggttaacgctggaacacctgccgcgcgcaacgttgccagcacatctgccagcacgtagctgtcctgcggctgctggcgcgtatgctgcaccagcgccgcatccggttgttgctcgtcgacgacctgcttcagtgcgctcaggtcattgaaatcaacagtaataagcgtcagccccatctgctcaataataacccgtgtcgtcgggtaaacaggcgcgtcatgcaccagaagacgctgccccggtttgagcaaagccgccagcccggcgcgaatcgcgccagtccccgcgtcctgcaccagcgccgcagcctgtgcgtgaaatgcatcagccagcacctgttccacacgctgggtaacgcgcggttgattcagtcctggcgttaagcctaaatcaccgccagtaagaaactcgctgccggggaaatggcgacaaatgctatccaccagcgcaaactgcttttgctgcgcctcaataatcgtcaggctttgcagaggaaacgtcttcataggtgccttccttaagccggaacgaacaggccaagccagtaaagaacattcagcagaataccggtgatcattactgccacgaccggtgccgccattttctgtaccggacggcccagggattcgttgaggaagtaaatggcaaccgcgatagagaatccggtataacccgccatcttaattgctgcgaaaatgctaccgaccagcagcgccacttccatcagcatattcatggcgttacggatgttatcgctcgcattacgcacgctcgggtagcgtcccagccatttgccgatgctacgaagcagcaagacttccgcgctaataaccactgcgcctaataccgctgcaaccatcggattcgggctgagatagtccaccgcataaacaaaggtaaagcccgcaactgcatacacacccgttgctaacgcggtggtggcaatcaacggcacaaaccccagtccgcgcataaattctgccagagccgcctgattaatcagcgtttggctttgttccggcgttacgcctgcggaatatgctttctccagtgtgaagatgctcacttcactgccagcaaaaatcttcatgctggcaacggcggcaatcaatgctcccacgatggcgatatagggtaagtttttgataatccgactcgtgcgttcttcaaacacgctaagcccgctggcatcaatgtcattttcatcacgatgacgcaggtcgtgagttatcgcgatccccagcagcatcaccatgccaataaagatttcgatggattcagggttaagatgtgggaaatagcgcacgactaccacacgggtcatcagtaccaccacggcggcgatcagactttgcttccagccaaactggtagaaaatcgccaccagcgggaacagtgcaaaagcactaaccaccgggctgcttaattcccccaggctacctaatacatccaccggcagcgcggtcagcagctggtttactggcaacaggcaagtaaggatcaacacgccccagatagcgccaagaccaaacgccatcaggctgtttatcgccaggacgccgaggatatcggtaggaagaaagagtaaccatgcgttgagcagcccggttttcagggtaaaagagatccccacgctggccacaaaaccaatgctcagaccaaaagcgatactccccgcctcgcgacggttcatatagccttcaatcagttgcggcaggatcgggcggatgccgtcatgaaaaacagccgcgctgcgatgcgccagaaggcttgtcatacccgtcaggcacgccaccacgataatctgaatatacagatccatagtcgtgccttttatttcagatggttaatcagcatcggaatcgcgtgttcgacgtgctcaacggaaaggccaaacgccacttttccttcagcgatcattttggcgatatgctcgtctttcgctttaatgcctggtttggcaatggtgcaacttttgttatagcctatcaccgcgatggcaatgctcaatgccgcgcccgcaccggtattacacgcgccgatgtaataatccagttgcccggatttcaccttcattgccgcttccatgtcgttgtgaatgaaaacttcaaaacagccaggagccgtcgcttcaatagtttttttaatctgctcacgctgtaagcctgcaacgccaatctttttcatgagtctgtccttattggaaaaattgagagggattttcacgtaacatcacatccacatcggcctgactgaatccactctggcgcaattgcggaataaaggtggttagtaaatagtcatagccataaccaccgttggcttttaaatgggagcggcgcgtaatatccatgctcagcatgacgcggttcagcaacccacggtcgcgtagcgcatgaagcatcgcaatacgcttttcgtccgggtagtaactgttcttgccgatggtgtcgaactgcacgtacgcgccgagatcgatcatcttcaaaatgttgtcgaggttgtctttcagatcgcagtgaccaacggtgacgcggctaagatcaaccccgtgggcttgtagcaacgccagttgctccagccccatcgtgctgaagctcgtatgcgtggagatcgggcgtccggtctggttatgcgccagcgcagcggcaataaataccttctcttccagcggcgtaatctttccttcgctggtgccgatctccgcgatgatcccggctttcagctccgtgccatcgataccctgttcaatttcatcgaccatctcctgcgccagttcctgcacgctgcgggtcgccacatgttccgggaaaaacgcgtcctggtaataaccggtacaggccaccacgttgatccccgtctcgcgcattacatcaagcataaattgcgcattgcgccccatgtaacggttggtcatctcaatcacattacgcacgccccgggtcatcaggtcgttcatctcctggcaaatgaacgcatactgatcaaggcggcagtccacgttgtttttaaagccggagagatcaatatgcagatgctcatgggcgagggtgtaacccgtcggatcaaaactcatagggtgtctcctgcaaaccggagggaggaaagaaaagagcgaccattttgtggcggtggcgcgcggaaaaattcacacacggtagcccccacatcagaaagcgtggtgcgcacaccgagctgcgtagcgatcatcccttgctgataaaccagcactggcaccacttcgcgggtatggtggctgtgaccaatggtcggatcgttgccgtgatccgccatcacgaccaggcaatcatctggctgcatcgcctcaacaagccgggcaaggttacggtcaacgacctgcaaacgttcggcataacgtgcgacgtcttctgcatgaccagcgaggtcggtttcctgaatgttggtgcaaataaacgccgtcggatgggtgttaaattcgttgagggtgatatccataatccgctggctatccaccagattttgccagctcacgccataaggattgttgacgatatctgccaccttacccaccagcacggttggcacgcctgcttcatacagtttttgtggcacctgcactttttcatcgacgccatagcccatatgcacgacctggaaaccgttgtcataagcgccagaacgcggcgcattgataccaataaagcgcccttctttgctttctgcggcatcgagaatgcgttgactgtcggttaacaggccaccaaatgtaatgacccgaccgacctgtacctgctcacgcacgatacgaccaattttgattgcgtcgtcaaaagagatcacagagagattggcggtaatgttatagacctggcctaaatccgcctcgagattatcgccaatcgcaaccgcctgattgacccacagaaattgcagatcatcgccacggcgctccacctgccagccagcggaaactaatgcctgctcaacacggtcaatcacatcgcgaaaaggcatccgcagcggcggtaacgggcgcgtgcctaaaatttcctgatgccccataaaggtatcgccaccttcatgttgcagctctgccacgccccaggttgcggaatcactcggctgcatatcgcctggcgcataacccaatgcgttgattagccccagcgtctccagcgttggtagctgcaaatgcggcaactggctcaggatgtgaccacatgtattcgctcccgcatcttgcggacgcaccagcgtgacatctttcattgcccctacgccaaagctatcaatcactaacaccacaaatcgcgccattacgcccccagagagtttccaagactgtcataacgaccgacgatttccggttcgccacgatgaataccggacaccagcaccacatcgctacgggtgacaaaaatctgcgtgcgaaaacagagcaccactgcactgcttaccggaaactcgcctgccagcggcagggtgtagtcgatactgctgtcatccacagttttgagattggtttcagtaatcttttgattttctggcgtaaacaccaacgcatgttgcgcatgaccacgacgatagtaaccgccgccgtagcagtagctgtcgccacggaaatgatgggagatttcacttaaccagagcatcgcgatacgttcaggctgatcgccctgctggtttgccggaatagtgcccgtcagcgcatgaccgggttcggcatgagtcacaccgtattgcgccagtaatggcaggctagtgcagctggtcgcactaggcgcgttcagttgctcaagtgcaataccagatttcgccagttgatcccgtgcctgtatcagcgtgtgaagattcggtgtcggcaaaacttttccgacagcctcatcccaaagcaggcaagggaaatgggtaagtccggctaaatgcagccctggcagattctggatttcggcgacaatctccggcaacaccttgagggcaaaaccgctctcctggcccggataaagaaaatcatcgtcgctataaactttaagcagcacagactggattcgcccggccttcaccgccgccgcagaaacttcccgcgctttgtcgagagtaaacacggtgatgacgtcggtgccctgttcaacggcgtcagcaacctgatgacaagggatttgtaccagatgcccctgatgcgccacaggcaaaccagcgcggcgcatgactcgcgcctctttgtaatccaccgccacaatgccgctgtagcctaatgccagcaatttttccgccagccacggattacgaccaaactgcttggtcatcagatacagttcaatgccgtaaagccgcgccgtctcaatcagccgcttaccgttttccagtatctgatccacgtcgatcacccagctgtccggggcgatcttgccctgctgccacaggcttagtgcggcggaaatcagcgccgggttctggcgtttcaatgcttctacaaacatcttgttgcctcgtttctgttccttgaattaaatattcatttttttgaatatttaggttgtgcgacgtggatttgtcgggagcttcaaacctcttcgttagcagccatccataatccataaaggttggccagcaaatagccttcttcacacgggttaacttccagtgcgaattccttcaacaacacctgatgcaattgcacaacggcttgccagtggctggattgcgccagttctgccagcaactcgttatccagcggctctatttcttcaccacggcgactgcgcatcagtgcactcgccatatgtgtcatcgccatcgttccttgctcactgcgcaccggcagatggcactctgtttccagtacgttgacgacctgcatcatgcctttgcagatgtccttatcaataacgcctgcctcgcaaagcaggttgagtctggtttccatatcagatgcctttcgtttaataactcggttcctgttccccactcactacccgttgttgatgggcgagcagggcgtgtttatctacaacggcacgcagcagttgttgcattgggtaatcatcgactcgcgtcaggaccacggcttcggtggcctgtaaaaatcgcggatcgtctgtgagcggcgtcgcctctaatcccagcatggtcagttcgttttccgccaccacgttccagatcaccgcatcgacatcgcctttaacaatgcgttgtaaactctcgtgataagagagatcgactcgttccacatcactaccgccaaaaaaaacatcggtcatgattttctgatccgcgctacggttatccagccccacgcgcttcacgtttgcggactcgcctttacggcaaatcaactggtgctcgccaacgtaggtgtgcggccccaactccagcgcgaggcataagcctttttgcgtgagataactttccgccgctagtcggctaaccaccgccatgtcatacacgccattaagcagacactccacgcgaatatccgcgccacgcatgtgcgcatagtaaaaaggaatgccatcaaactgggctttcaatccgctcgccaggccttcgtacaaacgggtatagggcaagggcattgcacataccacgttgttgatatccacatgagtcagcaatgctttgttatccatctcgaccagataactgccattgcgcccacggcgttcaatccgtatcgctccgctactttccagcgttttcaacgcggcctgcgtcaggccaacggaactacggcattcatttgccagctcatctatggttttcaatcgattaccgcacttttcacccaacaaataacgggccagcgtcgtgatgacgacgccttcttttttgataaacgttcgacgcataataaattttcagtaaattgaatatttatatcttcaggaatttgaagataaggcgcaacagcgagatgtggaaacggcgaggcacttcacattttttcggattattgcaaatgaggataaaaaaaccgggtttccccggtttcagagtgatgataaaagcaaaattgcctgatgcgctacgcttatcaggcctacatttccttgcaatatgtgcattactttgtaggccggataaggcgttcacgccgcatccggcatgaacaaagcgcaatttgccagcaatagtgaattacggcttcgccacaaaaccaatcgcttcgtacaccgcttttagcgtacgggaagcgtgcgcgctggctttttccgcgccatctttcatcacctgttgcaggaaggcttcatcgttgcggaaacggtgatagcgttcctgcaattcagtcagcataccggaaacggcatcagccacttcacctttcagatgaccatacatcttgccttcgaactgtttttccagttctgggatgctctggcccgttaccgcactaaggatatccaacaggttggaaacgcccgctttgttctgcacatcgtagcgaactaccggcggctcgtcggagtcagtgaccgcacgtttgattttcttcactacgcttttcgggtcttccagcaggccgataacgttattgcgattatcgtcagacttggacatcttcttggtcggctccagcaggctcattacgcgcgcgccagatttcggaataaacggctccggcaccttaaagatctcgccatacagcgcgttgaaacgctgggcaatatcgcggctcagttcgaggtgctgtttctggtcttcacccaccggtaccagattagtttgatacagcaggatgtccgctgccatcagcaccggatagtcaaacagaccagcgttgatgttctcggcataacgcgcagatttatctttaaactgcgtcatgcgactcagttcgccgaagtaggtatagcagttcagtgcccagcctaactgtgcatgttccggcacgtgggactgaacaaaaatggtgcttttctcaggatcgataccacaagccagatacaaggccagcgtatccagcgtcgctttacgcagcttctgtgcatcctggcgcacggtgatcgcgtgttggtcaacgatacagtaaatgcaatggtagtcatcctgcatgtttacccactgacgcagcgcacccatgtagttaccaatggtcaattcaccactgggctgtgcgccactaaaaacgatgggcttagtcatttttgctttcctgattttcgctatgcggaagccctaatgcgggcagaaggtcatttatagactgataaattacatcaggctggctgagatcgatagcctcgccgtagttatatccgtaggttaagccaacacttgggcaacctgccgcttttgccgcctgaatatcattgcgactgtcgccgacaaacagcatctgttgtggggcaattcccatccgctcagccaccagtaacagcgggtccggatgcggttttttgttttgcacatcatcaccaccaatcaccacgctgaagtatttggcgatatctaaggcttcgagcagcggcgcgacgaacggcgtcggtttgttggtgaccaggcctagcggcaggcctttagcctgcaacgcgcccaacgtatcggcaacgtgcgggaacaaaaacgtcccctcttcggcaacctcgccatagtagcgatcgaacagtttacgcagaatacgtacctgttcttctgccggaatgtcgtcatcaacgggcggtttacccattgttttacgctgagtcgcacgttcctgacgcgcccaggtcaatgcgcgctccatcagaacatctgcgccgttaccaatccaggtaataacgcgttcttcacctgcgacgggcaactccagcgcatacagcgccatatctaccgcagcagcaagaccaggagcactgtcgaccagcgtaccatcaagatcaaaagcgacgccgcgaatatcttcaaacttattcatgacttacctttgccagttcactgcgcatttcatcaatgacttttttgtagtctggctggtcgaagattgcgctaccggcgacgaacatatccgcgcccgccgcagcgatttcgccaatgttgttcaccttcacgccaccgtccacttctagtcgaatgtcaaagccagactcgtcgatacggcgacgtacttcgcgcagtttatccagtgtttgaggaatgaaagactgaccgccgaaaccagggttgacggacatcagcaggatcacatccagcttatccatcacgtaatccagatagctcagaggtgtcgccgggttaaataccagacccgctttacagccattttctttaatcagttgcagcgtgcggtcaacatgctcggaggcttctggatgaaaggtaatgatgctggcaccagcggcagcgaaatcaggcacaatgcgatcgacgggtttcaccatcaggtgtacgtcgataggggcggtaatgccatagttacgcaaggatttcagcaccattggcccaatcgtcagattgggaacatagtggttatccatgacgtcaaaatgcacgacatcagcgccagctgccagggcttttgcggtatcttcacccaggcgggcaaaatcagcgctcagaatactgggggcaatcaaatactgtttcatccgcttctccttgagaattattttttcgcgggactaacgactcctggtttgtacaaagccagcagttcgtccacctttttacgtgtgccgccgttgctgcttatactgcgtcgaactttgacgacatgcaattttgcgcgctgataccactcacgcgttaacatcgtatcgtgattggagatcagcactggaatatggcgctcaaccagaccttcggcgatctccgccagatgcgcttgttgttcaagcgtaaaactgtttgtgtgatacgccgtaaagttggcggtcgcagacagcggtgcataaggcggatcgcaatagacgacggatgcatcatctgcgcgcgccatgctatcggcgtaagactcacaatagaaaaaggcattctgcgctttttcagcgaagtgatacaactctgcttccgggaaatagggttttttgtagcggccgaacggcacgttaaactcaccgcgcagattgtaacgacacaggccgttgtaaccgtagcggttcaaatataaaaacagtaccgcccgacggaacggatcctggcttttgttgaactcttcgcggaactgatagtaaacctcggcgcaatttgtttcgggaacaaacagctcgcgtgcggcctgtacgtactcatcagtacgcatcttcacaatgttatagagactgatcaggtcgctattgatatcggcaaggatataacgagaaaagtcggtgttgagaaacacgctcccggcacctacaaaaggctcaaccagacattcgcccttgggcaaatgccgtttaatatcatcaagcaggggatacttgccccctgcccacttcaaaaaagcgcgatttttcttcatgctgactaactaattacaccttctccggctgtggagaaagctccgacagcatccagcgcttcaggcaactcccgcaacgataaaccattgcgggagataaccttgattacttcagatcggcctgtacctgacgcagcggtttcgcccacgggtttttggcctggacatctgctggcaatgtagataccgcttttttcgcctcttctttgctagcgtacacgccagaaaccaggacataccacggctgaccattacgcgtcgtttcatagacaacgtagtttttcagattctctttcttcgcccaaccgttcaggttgtcgtagttagaggaactgctcagctgcagagtgtaatggctggacggtgcgcttttcaagctaccaacattacctgcggtcttcgccccagcagcgggtgttgctgtggtttgcgccggggatgccgtctgtactggagccgtagtcgccgtctcttttggtgctggcgtagaagtcgcagccggtgccttcgtgctcgccacaggggcagctggttcagtacgcttcggcgtctgtgctaccggcttcggctccgttttcacggttgcttgcggttttttcggttcaatcaccgcctgctgacgagctgggcgcgtagtggacggacgttcagcggtttgcgttttcgccgtgtcacggcttgcattgccattgcgaacaggcgcaaccgttgcgggttcagtcggcaacgtggaattgaccgccacattgttcagctgttgctgattttgtggctgggtcagcgcattgttcaggtcaccctgcacttcaacacgttgttgaccatccgttgccaccggggtttgcccttgagtcggcgtagaagagatcggtggcagagaaacatcctgctgagtattttccgcagacgtggttcccggcgctggctgcacgccattcgcctgatcggtcgcattgccagcaagatcaatactcttctcgccagacgcggtttgatcgctggaagtggtgctgggggcttttagcgcagaaccgataccgatgatcaacagcagtagaaccagaatgccgacgcccatcatcatatactgacgagaagcgggtttactggctgcttttttgcgcttacgcggacgacgctctacgcgctcttcatccacggtttcatcttcggattcgtcaatttcttcttcgatttccggttcctcattgcgctctttttgcgcacgagtcggacggcgatcgtcagtgtcatcaagttcaatatcatcaaaattgatctgcggttcgccacgttcagtacgctcagaacgttcagaagattgacgagaacgaccagtacgacgatcgctgggatcgggtttcagctcgtcttctggtttgaattcatccatttaacaccccactaaaaggttaatgcttaccacgttgcaattaacctgaagctaatagaccgcttgataagcggcctgacctttcttgttgttacgcactttgacaatcggcaatggcgttaagaacaagctcgtggctaacgccgctgcgaacttcactcttaccaattgccaacggaagaattaagcgcatctctcccgcaaggactttcttgtcacgcagcatatgcggtaaatacgcctgcgcggacatttcgcgcggcccattgaccggtaacccagcccgcttgagcagggttataatacgctgcgtttcggcagaactaaactgcccgagacgttcgctcgtccgcgccgccatcaccatacccgcagcgaccgcttcaccatgtaaccaattgccataccccatttcagcttcaatggcatgaccaaaggtgtgtcccagattcagtaaagcacgtaacccggtttcgcgctcgtcggcggcgacaacttctgccttcagttcacaacaacggcgaatacagtacgccattgccggaccgtccagacgcaacaacgcatccagattctcttccagccagttaaaaaacgcaccgtcaagaataatgccgtatttgatgacttctgccagcccgctcgctaactcacgcgggggaagcgttttcagacagtcgagatccaccaccacactagcaggttggtagaacgcgccaatcatgtttttaccgaggggatggttgaccgcagttttgccgccaacggaggaatcgacctggctcagtaacgtcgtcgggacttgaatgaaacggacaccgcgctgataactcgccgccgcgaagccggtcagatcgcccactacgccgccgccaagcgccaccagcgtagtatcgcgaccatgcggtttttgtaacaacgccgtaaagacggtatcgagtacagccaggcttttatactgctcgccgtcagggaggataacgctatcgacgttaacacccgcctgttcaagtacgccgcggaccttatcgagatacagaggagccagggtttcgttggtgaccaacatgacctgctcgccgcttttcagcggtaagaaactagctggttcattaaacaaaccagatgcgatggtaattgggtaactacgttccccgagagtaacgacaatcctctccataacgcgacatccaccttaattactgtacccgcagacgagtgtatataaagccagaattagttgctttccagcatgtgaataatctggtttgcaaccactttagcgctttgatcatcagtacgaatggtcacgtcggcaatctcttcatacagcggattgcgttcattggccaacgcttccagaacttcacgcggcggtgtttcaacgtgcagcaacgggcgttttttatcacgctgcgtgcgtgcaagttgcttttcgatggtcgtttcaagataaacgacaacgccacgagcggaaagacggttacgcgtttcacgggatttcacagagccgccgccagtagccagcacaataccctgtttctcggtcaactcattgatgaccttttcttcgcgatcgcggaagccttcttcgccttctaaatcgaaaacccagcccacatcagctccggttcgtttctcaatctcttgatcggaatcgtaaaattccatattgagttgttgagctaactggcgcccaatagtgctttttccggcacccataggcccaaccagaaagatattgcgtttctctgccattttttcggtactactaagactattcgttaatgataaacccgcttcgctcagagagcgccgcaggacatgaactgaaacctcataagatattgcgagagtcagactgaaaattatctcaatactccagcgggtttggcaactgaataaatcacccatccctctgcatatctggtcgctgcaagcgcgctgccttgctaccaccgctctggcgataaatcaccgggtaagattagcgtaaaaaagacagcaaaatgccgcctgaatgataaatcatcatcatggaacgcaggcagcgaagagcaccaactctcaaatcggtactccttgtatgctaaatacctgcgcgcgtcaaatagatgaaacacgttcagcgtaaaaacattaccgcttttacggctgtttactcactggaaaccagtcgtggcgtgataaacaccactaactcgcgtcgttcatcttcttttccgtcatgacgaaatgattgcccgaaccagggaatgtcgccaagcaacggtacgctatcctgaccgcttttatttttacgggtaaaaatgccgcccagcgccaacgtttctccgcttttgacctcgacctgcgtttcgatctcctgcttatcaatcgccagcacttcgccatcggcctgctgtagcacctgccccggaacgttctggctgatgtgtaatttcagccggatgcgacctttttgtaacaccgtgggcgtgacctccatccccaggacggcctctttaaattccacgctcgtcgcgccactttccccgctggaaacctgatatggaatttcgctcccctgtttaatgctggcaggctgaagatgactggccagcagacgcggactggcgataatatccagctgctgtttttgttcgagcgcggaaagctcaagatccagcaagcgtccgttgatgcgcccaatgttaaaaccgacatgcgttgtcgccgtcgctacggagaggtcgctaccaagcgtggtgacttgcccaacgccaccagcgtgttgcgcatcggccagcgtccatttcacgcctaactcacgcaaacttttttcattaatggtgacaatatgcgcgctcagctcaacctgcccgaccggcagatccatttgcgctacccactgttcaagcgcgcttaacgccgttttgttatctcgtagcaaaaggcgattggtgcgtttatcgacggtcatactccctttggcactcagcagcttctcccccgctttcgccagttctcccgcgtcggcgtattgcagggttatactgcgattttccagcggcagatttgcctgcgcccgcgcctgctccgcctcctggcgggcgatattgttattctgccaggcaatggaatgcacactgagaatgttgccttcctgccgcgttatcagtccggcgcttttcactacagtttgtagtgcctgcttccagggaacatctgttagatgtaagctcaccgtaccgctgacgtctgggctcacgaccaggttcaacttctcctgttcagccagcgcctgcaacacctgagctaccggaacgtcatccaccatcagcgtcactttttgcggctttgccgcctgtacgccgggtatcagcatcaacagtagtgcggctatccattgcttcatttgtatctccttgccgttgccacaaccattgtggcggttcgcagtttgtcccggtacccagcgttagtacgtctggcgtcagctgtaaaattgtccagccgttttccagcacatcgttttgctgcacccgtcgccatttcttttgcccgtcttttattacaccgatgatgcgctcgcctcgccctaccatcccctgatagcgccactggctaagttcgctaatccggcatagatcttccggcggtttaaaagggtcacgcataccggttaaaaggcacaatgcaatacctgccaacaaccagcgtttaaccctcatgcggcgtctccagttgtagcgtgaacaaaagatcatcaccttccacgcttaagctaaaacggctcacgctgacgttgcgctctgccagccgtgtaaatgcgctcggcactgcttcccacagcgttttcaacgccaactcgcctccctgcgcggatggatgccaggaaaccagttgcgcgccggataactgaaaatccagtgggctaaagggcagcgttttttcctcgctgaagggagcggtgtctaccaggcgatacagtgcggcccactgctggtgatgacttgcccgtagtcgaattaatgcgtcgcgctcttcatggtgtgtgctactcagaaaaatgagcgtaactaacatcagcaaccagaatgcccagcaaagctggcggaggcggggacttgtggcgaaccaccagtcaaagaacatgttcatcgctaaccttccttgttaactgatactcaaattgccagcgtccctgcgcatcctgctgcgtggctccccgctgattgagatgaaaagatgcatcctggcggagactcgtttctagtgcgtttaacgcggtaatgcttgttgtcagccccttgatctccagcgttccctgctgccagcttatcgttgtcagccaggcgtgctcgggtaaaagcgccgccagtgcttccagcgcagattgccagtcgcgggtaaattgtcgctggcgctgccgttggctacgctgttcgcgtaactgctgttgctccagcaaacgtggcttcgttatctgtaagctgcgggcgagttgttgttccgcctgaagcaaaactgcgtctatgcgcgcttcggcgctgcctgtcagacgcagtattagcgttatcccgacggccagcagcagaggcgcaacgaacatcagcaaccagaaacgcagaaaagcggtccggcgttgctgtcgccagggcaaaaaattaattggcgggttcatcagtacgccttcccaagcgccagccccagcgcgatggcaaagtctccacctggcggcggtagcggcggctgacgaacagaaacggcctcccagggatcaaatccgccttcgccacatatcgcgacgctttcgggatcaacggataacgctgccgccagctccttcgcgctagtcatccccaccgccagtttgcgcccccagctatagcgcgtcgcccacagccactgttcgttatcacgccaggccagacattgctgatgagaaggtaaaaaaggcaggaatcgctgtaatgcactggcatccggggtgatcgcgctcacatgaacacgcaacctttctgccagagtaagcagcgttgccagctctttgctttgcgcggcagtcacgttataggcgggactgagactgtcttcgctgtaatcgaagcgcagggagtccggatccatatccagctcgcgggccatcgtcccactcagccaggccgtttgctcccgctcaccaagggacatgctcgggcgcggaaaactccgctgtaatgtgcgactggcgggaaacgccaacataatgtgatgacgctgcggcagttcgcgactccacggtaacaacgttttagccagctgctgcgcatcaacaatccgcccatctttgataatgtcgttctccagcggcaaccgccaccagcgttgcaaaaagcattcttttgcgccccgcacgatcgcaaccgctaccgcttcttgctgttgtaaatgcaaaccaatttgccagatcttaaatgccattgtgatgatctccttatcacccgtcactctgacgggtatatcaatgcgtctggcttgcctttatactaccgcgcgtttgtttataaactgcccaaatgaaactaaatgggaaatttccagtgaagttcgtaaagtattttttgatccttgcagtctgttgcattctgctgggagcaggcagcatttatggcctataccgctacatcgagccacaactgccggatgtggcgacattaaaagatgttcgcctgcaaattccgatgcagatttacagcgccgatggcgagctgattgctcaatacggtgagaaacgtcgtattccggttacgttggatcaaatcccaccggagatggtgaaagcctttatcgcgacagaagacagccgcttctacgagcatcacggcgttgacccggtggggatcttccgtgcagcaagcgtggcgctgttctccggtcacgcgagtcaaggggcaagtaccattacccagcagctggcgagaaacttcttcctcagtccagaacgcacgctgatgcgtaagattaaggaagtcttcctcgcgattcgcattgaacagctgctgacgaaagacgagatcctcgagctttatctgaacaagatttaccttggttaccgcgcctatggtgtcggtgctgcggcacaagtctatttcggaaaaacggtcgaccaactgacgctgaacgaaatggcggtgatagccgggctgccgaaagcgccttccaccttcaacccgctctacagcatggatcgtgccgtcgcgcggcgtaacgtcgtgctgagccggatgctggatgaagggtatatcacccaacaacagttcgatcagacacgcactgaggcgattaacgctaactatcacgcgccggagattgctttctctgcgccgtacctgagcgaaatggtgcgccaggagatgtataaccgttatggcgaaagtgcctatgaagacggttatcgcatttacaccaccatcacccgcaaagtgcagcaggccgcgcagcaggcggtacgtaataacgtgctggactacgacatgcgccacggctatcgcggcccggcaaatgtgctgtggaaagtgggcgagagcgcgtgggataacaacaagattaccgatacgctgaaggcgctgccaacctatggtccgctgctgcctgccgcagtcaccagcgccaatcctcagcaagcgacggcgatgctggcggacgggagcaccgtcgcattgagtatggaaggcgttcgctgggcgcgtccttaccgtagcgatactcagcaaggaccgacgccgcgtaaagtgaccgatgttctgcaaacgggtcagcaaatctgggttcgtcaggttggcgatgcatggtggctggcacaagtgccggaagtgaacagcgcgctggtgagcatcaatccgcaaaacggtgccgttatggcgctggtcggtggctttgatttcaatcagagcaagtttaaccgcgccacccaggcactgcgtcaggtgggttccaacatcaaaccgttcctctacaccgcggcgatggataaaggtctgacgctggcaagtatgttgaacgatgtgccaatttctcgctgggatgcaagtgccggttctgactggcagccgaagaacagtccaccgcagtatgctggtccaattcgcttacgtcaggggctgggtcagagcaaaaacgtggtgatggtacgcgcaatgcgggcgatgggcgtcgactacgctgcagaatatctgcaacgcttcggcttcccggcacaaaacattgtccacaccgaaagcctggcgctgggtagtgcgtccttcaccccaatgcaggtggcgcgcggctacgcggtcatggcgaacggcggcttcctggtggacccgtggtttatcagcaaaattgaaaacgatcagggcggcgtgattttcgaagcgaaaccgaaagtagcctgcccggaatgcgatattccggtgatttacggtgatacgcagaaaagcaacgtgctggaaaataacgatgttgaagatgtcgctatctcccgcgagcagcagaatgtttctgtaccaatgccgcagctggagcaggcaaatcaggcgttagtggcgaagactggcgcgcaggagtacgcaccgcacgtcatcaacactccgctggcattcctgattaagagtgctttgaacaccaatatctttggtgagccaggctggcagggtactggctggcgtgcaggtcgtgatttgcagcgtcgcgatatcggcgggaaaaccgggaccactaacagtagcaaagatgcgtggttcagcggttacggtccgggcgttgtgaccagcgtctggattggctttgatgatcaccgtcgtaatctcggtcatacaacggcttccggagcgattaaagatcagatcagtggttacgaaggcggtgccaagagtgcccagcctgcatgggacgcttatatgaaagccgttcttgaaggtgtgccggagcagccgctgacgccgccaccgggtattgtgacggtgaatatcgatcgcagcaccgggcagttagctaatggtggcaacagccgcgaagagtatttcatcgaaggtacgcagccgacacaacaggcagtgcacgaggtgggaacgaccattatcgataatggcgaggcacaggaattgttctgattaaaaaggcgcttcggcgccttttcagtttgctgacaaagtgcacttgtttatgccggatacggcgtgaacgcgttatccggctaacaaaatcgtgaaaactcaataaattgcagaaaccccataagcctgataaacattgtgcatcaggcaaacttcacgcatttacactcgcccctgccctttcaaccattcgcgcacgaggaacagcgcactgacattgcgcgcttcattgaagtcagggtcttccagccaatccatcatatgcgccagcggccagcgcacctgtggtagcggctctggctcatcgccttccagactttccgggtagagatcttgcgctaccacgatattcattttgctggaaaagtaagacggtgccatgctgagcttcttcaaaaaagtcagatcgttcgctccaaatccaacctcttcttttagctcgcggttagcggcttcgtagacgctttcacccggatcaattaatcctttgctaaaacctaattcgtaggattcagttcccactgcgtattcgcggatcaggatcaggtgatcgtccacaatcggcacaatcatcactgcttcccggttggttggacgcattcgttcataaacacgccgcacgccattgctgaactccagatccacgctctcgacggtaaacagtcgggaacgggctacagtttcaacattcagaatggtgggtttttgtaaacttttgctcatcgtgggatctatgctgtgaaatcagcggttattgtgcgatatcggacacgctttcggcaatgtgaattgcatgttatttacatttatgtaacttaataaataatcgtcctcaaatcaaattaaaagtcaataggttgaaataactccaggaatttgctgatattccgccttcagagggtttgctatgatcagcggttactgtgatgtgcttaatgatgctcaagttaaactccacgcttgccgatagccaaccgcagaatcatgtattgtgtccggtgcgactgaccacgcctgacagactaagtaagatggggaaagcatgagcaccattgtgatttttttagctgctttgctggcctgcagtctacttgcgggatggctgataaaagtgcgatccagacggcgtcagctgccctggaccaacgccttcgcggatgcgcaaacgcgtaaactcacacctgaagaacgtagcgccgttgaaaattatcttgagagcctgacgcaggtattacaggtgcctggcccaacgggagccagcgcggcaccgatctctctggcgctgaatgccgaaagcaacaacgtcatgatgctgacacacgctatcacgcgttacggcatctctaccgacgatccgaataaatggcgttactacctcgatagcgtagaagtccacctgccccctttctgggaacagtacatcaacgatgagaataccgttgaactgattcataccgatagcctgccgctggttattagtctcaacggtcatacgctgcaggagtacatgcaggaaactcgcagctatgccttgcaacctgttccgagtacgcaggcgagcattcgcggggaagagagtgagcaaatcgagctactcaatattcgcaaagaaacgcatgaagaatatgcgctgagtcgtccgcgcgggctgcgtgaagcgttgctgatcgtcgcctccttcctgatgttctttttctgcctgattaccccggatgtatttgttccgtggctggcaggcggcgcgttactgctgctgggcgcaggtctgtgggggctattcgcgcccccggcaaaatcctccctgcgggaaattcattgtctgcgcggtacaccccgtcgttggggattgtttggcgaaaacgatcaggaacagatcaacaatattagtctcggtattatcgacctggtctatcccgcacactggcagccatacattgctcaggatctcggtcaacaaaccgatatcgatatctatctcgaccgccatgtagtgcgtcagggacgatatcttagcctgcatgatgaagtaaaaaactttccgttacagcactggctgcgcagtacgattatcgctgcgggcagcctgctggtgctgtttatgctgttattctggatcccgctggatatgccgctgaaattcactctcagttggatgaaaggcgcgcagaccattgaagccactagcgtaaaacaactggctgacgctggcgtgcgggtaggcgatacattgcgtattagcggtacgggaatgtgtaatattcgaacttccggaacctggagcgcgaaaaccaatagtccttttttaccgtttgactgcagccagatcatctggaacgacgcccgcagtttgccattaccagaatctgaactggtcaacaaagcgacggcattgactgaagcagttaatcgccagctgcaccctaaaccggaagatgaatctcgcgtcagtgccagtttacgtagtgcaattcaaaaatccggcatggtattgcttgatgattttggcgacattgtactgaagacagcggatttatgttctgccaaagatgactgtgtgcgactgaaaaatgcgctggtcaatctcggcaacagtaaagactgggacgcgctggtaaaacgcgccaacgccgggaagctcgatggcgtgaatgtgttattacgcccggtgagtgcggaaagcctggataacctggtggcaacctccaccgcgccgtttatcacgcatgaaacggcgcgagcggcacaaagtctaaacagtccggcccccggcggattcctgattgtcagcgacgaaggcagcgattttgttgatcagccctggcctagcgcaagtctttacgactacccgccgcaagaacagtggaacgctttccagaaactggcacaaatgctgatgcatacgccgtttaacgccgagggtatcgtcacaaaaatcttcactgacgccaatggtacgcagcatattggccttcatccgatcccggatcgttccggcctgtggcgctatctcagcaccacattgctgctactgacgatgctgggtagcgccatttacaatggcgtacaggcctggcgtcgttaccagcgtcatcgcactcgcatgatggagattcaggcctattatgaaagctgcctgaacccgcaactgatcacccctagtgaaagccttatcgaataacacgtttgcgcggcaggttatgctaccctgtcgcgcaaattgcttcactctggagatttccctcatgcatatcaacattgcctggcaggacgtagataccgttctgctggatatggacggcacgttgctcgacctcgccttcgataactatttctggcaaaagctggtgcctgaaacatggggcgcgaaaacggggttacgccacaggaagcgatggaatatatgcgccagcaatatcacgacgtacagcatacgctaaactggtactgtcttgattactggagtgagcaactgggtctggatatctgtgcgatgaccaccgagatgggaccgcgtgccgtactgcgtgaagataccattccgtttcttgaggcactgaaagccagcggtaagcagcgaattttgctcaccaatgcgcatccgcacaacctggcggtaaaacttgagcataccggtctggacgcacaccttgatttattactttccacccacacatttggttatccgaaagaggatcagcggttatggcatgcggtggccgaagctacgggtctgaaagctgaaagaacgctgtttattgatgacagcgaagcgattctcgatgctgccgcgcaatttggtattcgttactgcctcggcgtgactaatcctgattccgggattgccgagaaacagtatcaacgccatccgagtctgaatgactaccgccgcctgatccccagcctaatgtgaaggagacgccatgaaagagaaacctgctgttgaggttcgactggataaatggctatgggctgcccgtttttataaaacccgcgcgctggcccgtgaaatgattgaaggcggtaaggtgcattacaacgggcagcgcagcaagccgagcaaaatcgtcgagctgaatgccacgctcactctgcgccagggaaatgacgaacgcacggtgattgtaaaggcgattactgaacagcgtcgccccgccagcgaggcagccttgctgtatgaagagactgcggaaagtgtagagaaacgcgaaaaaatggcgctggcacgtaaacttaatgccttaaccatgccgcacccggaccgacgcccggacaaaaaagagcgccgcgacctgttacgatttaaacacggcgacagtgaataactgtcacctgcaagagagatgattatgccgcaacatgaccaattacatcgctatctgtttgaaaactttgccgtgcgcggcgaactggtaaccgttagcgaaaccctgcaacagatccttgagaaccacgattatccgcagcccgttaaaaacgtgctggcagaactgctggttgcgaccagcctgttaaccgctacgctgaagtttgatggtgatatcaccgtacagctgcagggcgacggtccgatgaatctggcggttattaacggtaacaataaccagcagatgcgcggtgtggcgcgcgtgcagggcgaaattccagaaaatgccgacctgaaaacgctggtcggcaatggttacgtggtgatcaccattaccccgagcgaaggcgaacgctatcagggcgtagttggtctggaaggtgataccctggcggcctgcctggaagattactttatgcgttctgaacagctgccgacgcgcctgtttattcgcaccggcgacgtagacggcaaaccggctgcaggcggtatgttgttgcaggtaatgcctgcgcaaaatgcccagcaggacgactttgaccacctggcgacgctaaccgaaaccatcaaaaccgaagaactgctgaccttaccggcaaacgaagtgttgtggcgtttgtatcacgaagaagaggtgacggtttacgatccgcaggatgtggagttcaaatgcacctgcagccgtgaacgttgcgccgatgcgctgaaaacgctgcctgatgaagaagttgatagcatcctggcggaagatggcgaaattgacatgcattgtgattactgcggtaaccactatctgttcaatgcgatggatattgctgaaatccgcaacaacgcgtctccggcagatccgcaagttcattaatgagtatgtccggcagagagggctctgccggattttacgactaatacacctgatgcgctttgtcactcattcagattcacattcagcctttcaccatccactacaagatcgcgccacgctttaggcttcgtccccagttttccatccttcgcagctgtgagtaatttttctttcgttatttcgttcggaagtaaactcatatcaagcgcgtcccattcttttctgtcactgtcaaagccatagacaatgactctgtcatcattaaaagcaaacaggatccgctccgcctgaccatcactattcagatcttgctcgaccaggacgcaggcgtctttttcaatacaggtcatcacgttatagcgatcctggattaaggcgctccagaatgtcgcatcaggtttaacagaaccaggggcaattaacacattatcggctaatactttttcgcttacctgttgctgaagatgttgctctccatctaacgccatcagcagatcccgcgcgcgtttcgggtctttcataaacccggcatcgcttttcaggctctcaagcgcagcacgtccatagcgaccgctctgctcgagcatgtagatagttacctggtcactcgtgtttttgccgctctgataacgcgccatatggctgttcacgctaatgcgcatactgtccagcaccgggctattaagaagcaccagtatcaccaacaccaataagctaaccgcaaggttcactttgccctgaagaacaacgggattttgccctttacgccagacgatgctgacaaaataccccaggctccacaccagtaacaccagcaccgccagcacgccctgcaagcggtcgacagtccagccgtactgagcgacccgcagccataacgcccaggcggcgacgaacacatacagcggagcaaccagcaaagcggttttaatcaggcaacgcaacggccctgtccagggaagactcgctttttgcggatcgcggacaatagccattaagatcaattgcaaaaaggccagcgtcaacagcaacccggcggcggagatgtggcgagaaatcgcgctcaggcccgtaaacggcagggtgatgataaacatcagggttagcaaacttactaacggcagcaaccccgtggcgattaacgtgaacaacttttgaatagagtcgattaaacgactctgtgttcgcgcgaggatcaccgccagcgcggtaaccagacctaacgtgagataaataaaccagtcggttgcaaaaaagagcgtattgaaaaacgtgatgccaacaagtttaaacaactcactccacagtaaaagcaccagccacgtcaagccattggcgagaaaaatcaccagtaatataagtacgttatgccatacactctggtaaaaatagcgatagcggctactgtcattgcggatgcgaaggctttgttgtatccacggtagcaacaacattgccatcaacagcagatagcaaccaaaatcccaaagcgccttttcagctctccaggggttcatgccatcagtttgccacttcagccagccgctcatccccagcgtggcaataaacactagcgccagccatccccaaaggcgcttctgtttaaaagagatcacggagaagagtaaaacggaactaaacgcgacggtcgcaggcacgccataaacaatccaactgtgattttttccggaaagccaggcgatcagcaggtagcaaaccagaccctgaagtaatccggtagcaatcatcccccagcgtgttgcgggactaagttcaacgttatccatgttggttatccagaatcaaaaggtgggttaattatcgcatccgggcagtagtattttgcttttttcagaaaataatcaaaaaaagttagcgtggtgaatcgatactttaccggttgaatttgcatcaatttcattcaggaatgcgattccactcacaatattcccgccatataaaccaagatttaaccttttgagaacattttccacacctaaaatgctatttctgcgataatagcaaccgtttcgtgacaggaatcacggagttttttgtcaaatatgaatttctccagatacgtaaatctatgagccttgtcgcggttaacacccccaaaaagactttactattcaggcaatacatattggctaaggagcagtgaaatgcgcgttaacaatggtttgaccccgcaagaactcgaggcttatggtatcagtgacgtacatgatatcgtttacaacccaagctacgacctgctgtatcaggaagagctcgatccgagcctgacaggttatgagcgcggggtgttaactaatctgggtgccgttgccgtcgataccgggatcttcaccggtcgtagtccaaaagataagtatatcgtccgtgacgataccactcgcgatactttctggtgggcagacaaaggcaaaggtaagaacgacaacaaacctctctctccggaaacctggcagcatctgaaaggcctggtgaccaggcagctttccggcaaacgtctgttcgttgtcgacgctttctgtggtgcgaacccggatactcgtctttccgtccgtttcatcaccgaagtggcctggcaggcgcattttgtcaaaaacatgtttattcgcccgagcgatgaagaactggcaggtttcaaaccagactttatcgttatgaacggcgcgaagtgcactaacccgcagtggaaagaacagggtctcaactccgaaaacttcgtggcgtttaacctgaccgagcgcatgcagctgattggcggcacctggtacggcggcgaaatgaagaaagggatgttcagcatgatgaactacctgctgccgctgaaaggtatcgcttctatgcactgctccgccaacgttggtgagaaaggcgatgttgcggtgttcttcggcctttccggcaccggtaaaaccaccctttccaccgacccgaaacgtcgcctgattggcgatgacgaacacggctgggacgatgacggcgtgtttaacttcgaaggcggctgctacgcaaaaactatcaagctgagcaaagaagcggaacctgaaatctacaacgctatccgtcgtgatgcgttgctggaaaacgtcaccgtgcgtgaagatggcactatcgactttgatgatggtagtaaaaccgagaacacccgcgtttcttatccgatctatcacatcgataacattgttaagccggtttccaaagcgggccacgcgactaaggttatcttcctgactgctgatgctttcggcgtgttgccgccggtttctcgcctgactgccgatcaaacccagtatcacttcctctctggcttcaccgccaaactggccggtactgagcgtggcatcaccgaaccgacgccaaccttctccgcttgcttcggcgcggcattcctgagcctgcacccgactcagtacgcagaagtgctggtgaaacgtatgcaggcggcgggcgcgcaggcttatctggttaacactggctggaacggcactggcaaacgtatcagcattaaagatacccgcgccattatcgacgccatcctcaacggtagcctggataatgcagaaaccttcactctgccgatgtttaacctggcgatcccaaccgaactgccgggcgtagacacgaagattctcgatccgcgtaacacctacgcttctccggaacagtggcaggaaaaagccgaaaccctggcgaaactgtttatcgacaacttcgataaatacaccgacacccctgcgggtgccgcgctggtagcggctggtccgaaactgtaatgatttgaagctggagaatatctatccagtatcttatagaaagcaaaacgggaggcaccttcgcctcccgtttatttacccttcttttgtcgtgccctgcgcccgcgttaccggcactggcagccaggcgcgaatggaaagcccgccccgctcgctggtgccaagctccagcatcccgttatggttatccacgatacgctgcacaattgccagccctaatcccgtgccgctaatggtgcgcgcactgtcgccgcggacaaacggctggaacaggtgcttacgttgttccggcgcaattcccggaccgtcatcttccacctggaaccaggcgcgattcggctccgttccgctgctgactttgatccagccattgccataacgggcggcgttgaccaccatattcgccaccgcgcgtttgatgctcagcgggtgcattttcacttcaatgctgccggggtaaagcgcggtttcaatttcccgctcatagccactttcggcagcaatcacctcaccgagtactgcattaagatccgccatttccatcggcatctcctgcccggtgcgcaggtagtcgataaactgctcaatgatggcgttgcactcttcgatatctttattgatgctttctgccagatagccatcctgctcgctcatcatctcagtcgccaggcgaatacgcgtcagcggcgtgcgcaagtcgtgacttacccccgccatcagcagcgtgcggtcatccgccagttgcttaacaccagccgccatatggttaaaggcacgggtaacggaacgcacctcgctagcgccatactcacgcagcggcggcggaataatccctttaccaacctgcaaggctgcgtgttcgagatcgaccaacggtcggttctggatacgaataaacagccacgccccgcctatcgccaatagcataatcgccagcgtatagcggaacagcggagagaaatcgccctgatgaatttcggtcagcggcacgcgtacccagatattggggctcagccaggttttcagccagacgacagggctacttttgttgacctcaacgcgcacttccgtcgggccgcccagttgctgcgccatctgatggcttaagaattcatagtgttgcgcccaacgcagacctgcctcttcggcagcctcgttggagtagagagagatccccagctcacggtagatctcccgacggaaagcgggaggcacaaccaactgcgtgccgtcctccagttgcagtttgtcggtcatcaacatacgcacttcgtacgcgaggactttattaaactgctggaggctcggcaaaatcgcgaagttcagcaccaccagataagtcgtcaccaggctggcgaacagcaaggtgacgatgagcaataacgtacgggcaaaactacttcgtgggctgaagcgcaatcgcctcatgctttagagccgtccggtacaaagacgtagcccagaccccagacggtctgaatgtaacgcggatgcgctggatcttcttccaccatgcggcgcagacggctaatctgcacgtcgatggagcgttccattgcggaatattcacgaccacgggcaaggttcatcagcttatcgcgggagagcggctcacgcggatggctgaccagtgccttcagtaccgcaaactcaccgctggtgagcggcatcggctcgtcttcgcggaacatttcgcgcgtaccgaggttaagtttgaacttaccgaaagcaattaccgcctcttcctgactcggtgcgcctggcagttcgttcgcctgacgacgcagcaccgcacggatacgggccagcagttcacgcgggttaaacggttttggaatgtagtcgtcagcgccaatctccaggcctacgatacggtccacttcttcccctttcgccgtcaccataatgatcggcatcgggttgctctgactacgaagacgtcggcaaatgctcaagccatcttcaccaggtaacattaaatccagtaccataagatggaaagattcacgagtcagcaggcgatccatctgttctgcattagcgacgcttcgaacctggaagccttgttcggtgagataacgttccagcagcgcacgcaggcgcatgtcgtcatcgaccaccagaatcttgtagttctcttgcattgtttgtactcccaaaggttcgcaacaatttgtaagcgtgtattcttaaaaaagctcacgttcgtcaccagctaaatctggtatgaatttcagcctaaattgttacaaagcatattaaacagcagcttaagtatacaatttattcggcgaaacattattgattctgttgatatgatcacgttatacccaatgtgcgcattatcaaacagacaaagggaatcaacgagatgaaaacgcccctggttacccgggaagggtatgaaaaactcaaacaagagcttaattatctctggcgtgaagaacgcccggaggtcacaaaaaaggtgacctgggccgcaagtctgggcgaccgcagcgaaaatgctgactatcagtataataaaaagcgtctgcgtgaaatcgaccgtcgcgtgcgctatctcactaaatgcctggaaaatctcaaaatcgtcgattactcccctcagcaggaaggcaaagtcttttttggcgcgtgggtggagattgaaaacgacgatggcgtgactcaccgtttccgtattgtcggctacgatgaaatttttggccgtaaagattacatctctatcgattccccgatggcccgcgcattgctgaaaaaagaagtcggcgatctggcggtggtgaatacccctgccggggaagcgagctggtatgttaatgctatcgagtacgtgaaaccgtaaggaagagtcttaacctcctgccgatggctggcatttttgccagccagtccgtataactatcccctgatttttgatccgaaaagatgaactcaaaccatgatgaatgatagcttctgccgcattattgcgggtgaaattcaggcgcgcccggaacaggttgacgctgccgttcgcctgcttgacgaagggaataccgtgccgtttatcgcacgttatcgtaaggaaatcaccggcggtctggatgacacgcagctgcgtaatctggaaacgcgtctgagctatctgcgcgagctggaagagagacgtcaggcgatcctcaagtccatttccgagcaaggcaaactcaccgatgatctggcgaaggccatcaacgccaccctaagcaaaaccgaactcgaagacctctacctgccctacaaacctaaacgccgcacccgcgggcaaatcgccattgaagcagggcttgagccgttggctgacctgctgtggagcgatccgagtcacacgccagaagtcgccgctgcacaatatgtttatgccgataaaggcgtggcagataccaaagccgcgctggatggcgcgcgctatatcctgatggaacggtttgccgaagatgccgcgctgctggcgaaagtgcgtgattatctgtggaagaacgcgcatttggtttctacggtggtgagcggtaaagaagaggaaggggcgaaattccgcgactatttcgatcatcacgaaccgttgtccacggtgccttctcaccgcgcgctggcgatgttccgtgggcgtaacgaaggcgtacttcagcttagcctgaatgccgatccacagttcgatgagccgcccaaagagagctattgcgagcaaatcatcatggatcaccttggcctgcgcctgaacaatgccccggcggatagctggcgcaaaggcgtggtgagctggacgtggcgcatcaaggtgctgatgcatctggaaaccgaactgatgggcaccgtgcgcgaacgtgcggaagatgaagcaatcaacgtctttgcccgtaacctgcacgatctgctgatggcggcccctgccggactgcgtgcaacgatgggcctcgatccgggtctgcgtactggggtaaaagtggcggtggtcgatgccactggcaaactggtggcgaccgacaccatttacccgcacaccggacaggccgcaaaagcagcgatgaccgttgctgcgctgtgtgaaaaacataacgttgaactggtagcgatcggtaacggtacagcttcccgcgaaactgagcgtttctatctcgatgtgcagaagcagttcccgaaagtgaccgcgcagaaagtaatcgtcagcgaagcaggcgcgagcgtttacagcgcttccgagctggctgcacaggagttcccggatctcgacgttagcctgcgtggcgcggtgtctatcgcccgccgtttgcaggatccgctggcggagctggtgaaaatcgatccgaaatctatcggcgtaggtcagtatcagcatgacgtcagccagacgcaactggcccgcaaactggacgcagtagtagaagactgcgtaaacgccgttggcgtcgatctcaacactgcttctgttccgctgttaacccgcgtggcgggcctgacgcgcatgatggcgcaaaacatcgttgcctggcgcgatgagaacggtcagttccagaaccgtcagcaactgttaaaagtgagccgtctggggccgaaagccttcgagcagtgcgcgggcttcttgcgcattaaccacggtgataacccgctggacgcgtctaccgttcacccggaagcctatccggtggtggaacgcattctggcagcaacacagcaggcactgaaagatctgatgggtaacagcagcgaactgcgtaacctgaaagcgtctgactttactgatgagaaattcggtgtgccgacggtaaccgacatcatcaaagagctggaaaaaccgggtcgcgatccgcgtccggaatttaaaaccgctcagtttgccgatggcgtcgagacaatgaacgacctgcaaccgggtatgatcctcgaaggcgcagtgaccaacgtcaccaactttggcgcgtttgtcgatattggcgtgcatcaggacggcctggttcacatctctagtttgagcaacaagtttgtggaagatccgcataccgtggtgaaagcgggcgacattgtgaaggtgaaagtgctggaagtggatcttcagcgtaaacgtatcgccctgactatgcgcctggatgagcagcctggcgaaaccaacgctcgtcgcggcggcggtaatgaacgcccgcaaaacaaccgcccggcagccaaaccacgcggtcgtgaagcgcagcctgccggtaatagcgcgatgatggatgcgctggcggcggcaatgggcaaaaaacgttaaacgcccgtactggcctacggttcgaatttgcacgaaatcgtagggcagataaggcgttcacgccgcatctggcaacgaacgccttgcctgacataaaagtgccggagaatatctccggcatttttattccacagccaaactcataatatattccggcaatatttatcatttcattaacaactgaaaccttaattaaacattagccagtccgggtaattcactattcgaattatattttcgctgcgatataaccttgagccacatcaacattgagtcagattattattcaaaccaacattcgcacacattttaagtattgctgatagaaaccattctcattatcattgtgttgttgattatttaatctctcctttgttggcaaatcatctggtctcatgtcgctgtcaaacgccccatgaggtagttatccagttaatgagaaacaagtaggcacctatgcaatacactccagatactgcgtggaaaatcactggcttttcccgtgaaatcagcccggcatatcgccaaaaactgctttctcttggcatgttacctggctcctcttttaatgtggtgcgcgtcgctccactcggcgaccccattcatatcgaaacccgtcgtgtgagcctggtattacgcaaaaaagatctggccttattagaagtggaagcggtttcctgttaatacggtgataacaacaatgaaaaaattaaccattggcttaattggtaatccaaattctggcaagacaacgttatttaaccagctcactggcagtcgtcagcgtgtaggtaactgggctggcgttaccgtcgaacgtaaagaagggcaattctccaccaccgatcatcaggtcacgctggtggacctgcccggcacctattctctgaccaccatcagtagccagaccagcctcgatgagcaaatcgcctgtcactacattttgagtggcgacgccgacctgctgattaacgtggtggatgcgtctaaccttgagcgtaacctgtacctgacgctacaactgctggaactcggcattccctgcattgtggcactgaacatgctcgacattgccgagaagcaaaatattcgtattgaaattgatgctctgagcgcgcgtctgggctgtccggtgatcccgctggttagtacccgtggtcgcggtattgaagcgctcaagctggcgattgatcgctataaagctaacgagaatgtggaactggtgcattacgcacagccgctgctcaacgaagcagatagtctggcaaaagtgatgccttccgacatcccgctgaaacaacgtcgctggctgggcctgcaaatgctggaaggcgatatctacagccgcgcctacgccggtgaagcgagccagcatctggatgccgccctcgcccgtctgcgtaatgagatggacgatccggcgctgcacattgccgatgcgcgttaccagtgcattgctgccatctgtgatgtggtaagcaacaccctgacggcagaacccagccgtttcaccactgcggtagataaaatcgtgctcaaccgtttcctcggtctgccgattttcctctttgtgatgtacctgatgttcctgctggctatcaacatcggcggggcgttacagccgctgtttgacgtcggctccgtggcgctatttgtgcatggtattcaatggattggctacacgctccacttcccggactggctgactatcttcctcgcccagggcctgggtggcggcattaacaccgtgctgccactggtgccgcagattggcatgatgtacctgttcctctccttccttgaggactccgggtatatggcgcgtgcggcgtttgtgatggaccgtctgatgcaggcgctgggcttgccggggaaatcctttgtgccgctgatcgtcggtttcggttgtaacgtaccgagcgtaatgggtgcacgtacgcttgatgcaccgcgtgaacgtctgatgaccatcatgatggcaccgtttatgtcctgcggcgcgcgtctggctatcttcgcagtattcgcggctgccttcttcgggcagaacggtgcgctggcggtcttcagcctgtatatgctgggtattgtgatggcggtgctgactggcctgatgctcaagtacaccatcatgcgcggtgaagcgacgccgtttgtcatggagttgccggtctatcatgtaccacacgttaaaagcctgattatccagacctggcagcgtctgaaaggcttcgttctgcgtgctggtaaagtgatcatcatcgtcagcattttcctgagcgctttcaacagcttcagcctgagcgggaaaatcgtcgataacatcaacgacagcgcgctggcgtccgtcagccgggtgatcaccccggtcttcaagccaattggcgtgcatgaagataactggcaggcaacggttggcctgtttacaggtgccatggcgaaagaagtggtagtgggtacgctcaacaccctctacaccgcagaaaatattcaggacgaagagttcaatccggcagaatttaacctcggtgaagagctgttcagtgcgatagatgaaacctggcagagcctgaaagacaccttcagccttagcgtactgatgaaccccattgaagccagcaaaggcgacggcgaaatgggtaccggggcgatgggcgtgatggatcagaaattcggtagcgcagcagcagcttacagctacctgattttcgtcctgctgtatgtaccatgtatcagcgtgatgggggctatcgcccgtgaaagtagccgtggctggatgggcttctccatcctgtgggggctgaatatcgcttacagtctggcaacattgttctatcaggtcgccagctacagtcagcatccaacttacagcctggtgtgcattctggcggttatcctgtttaacatcgtggttatcggtctgctgcgccgcgcgcgtagccgggtggatatcgaactactggcaacccgcaagagcgtaagcagttgctgcgcagccagcaccaccggtgattgccattaatggctagtcttattcaggtgcgcgatttgctggcgttacggggccgtatggaagcggcccagataagccagacattgaacactccacagccaatgattaacgccatgctgcaacaactggaaagtatgggcaaagccgtgcggattcaggaagaacctgacggctgcctctctggcagttgtaaaagctgcccggaaggaaaagcctgtctgcgcgagtggtgggcgctgcgttaaccttactccatcgcctgttttggaaagcccggtatgcgtctgcatccgggcttttttgcgtgcggctttccataaaaatgcaactcttgcagcacggcgtaagttcctttgaaagcatctcgcagggatgaaaactcgctaatacacaggtgtggagtggcgcgtagagtcgcggcattcaaacaacaggtgaaggaacgccatgagcaaaaagcagagttccaccccacacgatgcgctgttcaaactctttttacgccaaccggacacggctcgtgattttcttgcgtttcatttaccggcacccattcacgcgctttgtgatatgaaaaccctcaagctggagagcagcagctttattgatgacgatctgcgtgaaagctattccgatgtgctgtggagcgtgaaaacggaacaaggaccaggatacatctattgtctgattgaacatcaaagcaccagtaacaaactgatcgcatttcgcatgatgcgttacgctattgccgcaatgcaaaatcaccttgatgctggatacaaaacgttgccgatggtggtgccattgttgttttaccacggtattgaaagcccctatccctatagcctgtgttggctggattgtttcgccgatcccaaactggcaaggcagctttatgcctccgcatttccgctgattgatgtcaccgtcatgcctgatgatgaaatcatgcagcaccgacgtatggcgctgctggagttaattcaaaaacatattcgtcaacgcgacctgatggggctggtagagcaaatggcctgcttattaagtagtggatacgctaatgacagacaaatcaaagggctgtttaattacatactgcaaactggcgacgctgtacgttttaacgattttatcgacggcgttgccgaacgtagtccgaaacacaaggagagtttaatgactattgcggaaagattgcggcaggagggggaacaatccaaagccctgcatatagccaaaataatgcttgaatccggagttcctcttgcagacatcatgcgctttaccgggctgagtgaagaagagttggctgcggcgagtcagtaaagttctgtctcgccatttcaaaagccacttacaccctctgcttcaacgccaccagcaggtgacaaaactcggccggatggctaataaatggcgcatgggccgctttggcgaagatataactttcgctgtgaggccaaagtttatccagcatcggcaccactttgcgcggcaccagaccgtcgagatagccatacaatcgcaaaaacggcatggacacgttttgcagcggctgacggagatcgaccgttttcaggatttccagcccgccattaagcacgtcaacctccggcatcggtaacgccagaacggttttcttcaacgcccgcgcatcctggcgcgccgtttcagtccccatggtttgtaacgccaggaaccgctccactgtacgctgaaaatcatcactgagttgctgctgaaatcccgccagcacgtccggtcttatccccggccactcgtcacgagcactaaaacaaggactgctcgccacggtgaccagcgcctgaacacgctcgggatgggttaacgcaatctggcttgccaccagcccgcccagactccagcctaaccaaatggctttatcaggtgcctgttgcagcacggcttcggccatatcagcaagactcagcgcaccaaatccccggctacgcccgaagccgggcaggtcaacaaggtgcagcgtaaaatggctgctaagttcctcgtcaatgcaacgccacacttcggcattcagtccccatccgtgcagcagcacaagatgaacattcccctgacctttggtctgccaccagatgttattcatccgctattgttctcttttgacttacaaggatgaacatatgctaacagtaccgggattatgctggctatgccgaatgccactggcgttaggtcattgggggatttgtagcgtctgtagtcgcgccacccgcacagataaaacgttatgcccacaatgtggattacccgccacacactcccatcttccctgcggtcgctgcctgcaaaaaccgccgccctggcaaagactggtcacggttgccgactatgcgccgccgttaagtccgcttatccaccagcttaaattttcccggcgcagtgaaatcgccagcgccctgagtcgtctgttactattggaagtcttacacgctcgtcgcaccaccgggttgcaattgccggatcgcatcgtcagcgttccgttatggcagcggcgtcactggcgtcggggatttaatcagagcgatttgctgtgtcagccgttaagtcgctggttgcactgccaatgggatagcgaagccgtcacacgtacacgggccactgcgacccagcattttctcagtgcccggctgcgcaagcgcaacctgaaaaatgcctttcgtcttgaattgcccgtgcaaggtcgccatatggtgattgtggatgatgtcgttaccaccggaagtaccgtcgcagagattgcgcagttgcttttacgcaatggtgcggcggctgtccaggtctggtgcctttgtcgaaccttgtaaagcctcgatgatgggcgtattataaccaactaaaatagtcaactattaggccattactatgatccgtatttccgatgctgcacaagcgcactttgccaaactgctggcaaatcaggaagaagggacacaaatccgcgtatttgtgattaaccctggcacgcctaacgctgaatgtggcgtttcttattgtccgccggacgctgtggaagccaccgacacagccctgaaatttgacctgctgaccgcgtatgttgatgagttaagcgcaccatacctggaagatgcagagatcgattttgttaccgaccagttgggttcccagttaacgctgaaagccccgaacgccaaaatgcgtaaagtggcagacgatgcaccgctgatggagcgcgtggagtatatgctgcagagccagatcaacccacagcttgctggtcacggtggtcgcgttagcctgatggaaatcaccgaagacggttacgccattctgcaatttggcggtggctgtaacggttgttccatggtcgatgtgacgctgaaagaagggatcgagaagcagctgctgaacgaattcccggagctgaaaggtgtgcgcgatctcaccgaacaccagcgcggcgaacactcctactactaagttatcccctcttttgtagattgcccgatgcgacgctaaagcgtcatttcgggcctacgttgaacatgtgccagacgttggcgcagcattgctttgtcaaatcctcggttcgtttccccgcgataatatgaccaacctctcataatttaaatttaccccgctctggtgattctcaaacgccagatgttacccgtatcattcacatgggtaccaaacatactcctgacatctgactacaataattagttttagtgggtatcagtcgtggtgccgcaatatctctgttcccgattgggataattagagtttgtcgtcagaaaattgacgttacccataacaaatgaaaggccaggtaaatcatgccattagtcattgttgctatcggtgtaatcttgttgttgctcctgatgatccgcttcaaaatgaacggcttcatcgctctcgtcctcgtggcgcttgctgttggattaatgcaaggaatgccgctggataaagttattggctccatcaaagccggtgtcggcgggacgctcggtagccttgccctgatcatgggttttggcgcaatgctgggcaaaatgctggcagactgcggtggcgcacaacgtatcgccaccacgctgattgccaaatttggtaaaaaacacatccagtgggcggtggtactgaccggttttaccgttggttttgccctgttctatgaagtgggctttgtgctgatgctgccgctggtgtttaccatcgcggcttctgcgaatattccactgctgtatgttggtgtaccaatggcggctgcactgtctgtgacccacggcttcctgccaccgcatccgggtccgactgcgattgccaccattttcaatgccgatatgggtaaaaccctgctgtacggtactattctggcaatcccgaccgtgattctcgccggtccggtttacgctcgcgtgttgaaaggtatcgataagccaattccggaaggtctctacagcgcgaaaaccttcagcgaagaagagatgccgagctttggcgtcagcgtctggacctctctggtgccggtagtactgatggcgatgcgtgcgattgccgaaatgatcctgccgaaaggtcacgctttcctgccggtagcggagttcctcggtgacccggtaatggcaacgctgattgccgtgctgattgcgatgttcacctttggtctaaaccgtggtcgtagtatggatcagattaacgacacgctggtttcttccatcaaaatcattgcgatgatgctgttgatcatcggtggtggcggtgcgttcaagcaggtgctggtagacagcggcgtggacaaatacattgcttccatgatgcacgaaaccaacatttctccgctgctgatggcctggagcattgctgccgtactgcgtatcgcgctgggttccgcaaccgttgcggcaatcactgcgggtggtatcgcggcaccgctgattgcaacgacgggtgttagcccggagctgatggttattgcggttggttccggtagtgtgattttctctcatgtgaacgatccgggcttctggctgttcaaagagtactttaacctgactatcggcgagaccatcaaatcctggagcatgctggaaaccattatcagcgtgtgcggtctggtaggctgtctgctgctgaatatggtgatttgataacactgactgccggatgcggcgtgaccgccttatccggcctacgattcgggatgaattagtaggccggataagacgcgtcaagcatcgcatccggcatcaaccgcactttacttcttcttcgctgcagctctgcgccgtctgtccaaatccttcagcaacttgttcacgccatcatcggcaaacatgctctcaagcgttgcggaaagcttgcgtcgccagtttttatactggtaactggtgccaggaatattcaccggttcggccatatccagccagtcttccggctgtagtcctaacagagcactgttactgtcggcaatgtagcgctgcaaaccacggttcagcgtcggcgtcatgctcatcaagcttgccttatgcccggcacgtttcggcagacaaccatatttatgcagtgcatccagcagcccttgcttcgccagttcgcgatcctgatacagaccgcgcagtaccacttcatccggatacagccccagggttttgcccagcgttagatccccgcactcccagtaaccgcgcagcgttggcaggtcatgtgtcgccgcaaccgccatgctctgctccggatacgctttcggtgcacggaacgtcttctcgtggtcgttttcgaaatagagcactttgtaagagtacacaccgctgctgcgcagcttaccgacaatctctaccggtacggtaccgagatcttcaccaatcaccatacagcgatgacgtttactttcgagtgccagaatgctgagcagatcatccaccggatagtgaacatacgcgccctgatctgccgtctcgccatacggtatccaccacaaacgcagcatgctcatcacatggtcaattcgtaatgcgccgcagttttgcatattggcacgcaacagctcgataaacggttcataggcacgcgcggtgatgatatgcgggtccattggcggtaatccccagttctgccccaacgggccgaggatatccggcggcgcgccaacgcttgctttcaggcaatatagttcacggtcacaccaggtttccgccccaccttccgctacgccaaccgccagatcacgatacaagccaatcggcatttcatagccctggcttatctcccagcaggcggcaaactggctgtaagccagccactgcaaccagagataaaaatcgacgtcatcacgatgttcttcgcagaactgacgcacttctggactatccacgttctgatacatctctggccatgcaggccagccccagcgcatttcgtcctctttcacttgctgggcatgtagcgcatcaaaggctgcctgccagaacaggctgtcgccctgctctgcaacaaactggcgaaacgcggccatctgctcatcatcacgttgcgcgaaacctttccacgccattcgtaatgctgtcatttttagggcggtaaccgtggagtaatcgacccagtcggcatcgcgcgcctgttgcagcgtctgttgcgtggtcggcaactgccaccaggcctgagcctcttcgctaagatggaaatcttcaacggcgttaacgtcgatataaatcacattcagccaacggcgagaagacgggctgtatgggctggcgctctccggatttgccggatagagcgcatgaatcgggttcaggccaatgaagctcccgccacgttttgccacatccaccagcatcgctttgagatcgccaaaatccccaataccccagtttttttcgcttcgcagcgtataaagctgaacgcaggcaccccacagcttttgtttattcagcaacgcctgcggttcgtaacagcgtttcggggcgacaatcacccggcaatgcgcgcgctggtcgtcctgggtgagtgtcagcgtgtgataaccttccggcagcttcgtcggtagattgaacgctttgccccccgttacatggcctttgtactgcgttccttcttcggtggtcagcagccagctatattcgccgctgccctccaccaccatcggcatttttttgccgctggtataaaccatgacattcgggactggcgttaccgccactttcgtggcggtacgttgatgcatcgcgtcaagcaaacgccgtttggtttcggcgctaatgctctgcggtttaccgtgggcattgatgtaattggggctaatccccgccgccagcgcggcattatccagacgtttgctttccatcgagcttccttagcgttttgcctgccagatacgagcctgataatcgcgaatagagcgatcgctgctaaacataccgcagcgggcggtattgaggatcgccgcgcgagtccaggcctcctggtcgcggtacagcacatccacctgcttttgtgcctctacataggctgcgaaatccgccatcaccagatacggatcgccgccctgtttgccgatactgtgcagcatctagtcgaaggcatgcttatcgccgtcgctgtatttaccgctttccagctctttcaatactgcgtccagcaccttatctttcttccgccatttcaccgggtcgtagcctttggccagaattgccttcacttgttccacggtatgaccaaaaataaagatattttcttcaccgactttctcggcgatttcaacgttcgccccatccagcgtaccgacagtaagcgcaccattgagcgccagtttcatattgccggtaccggaagcttctttacctgcagtgctaatttgttcggagatatccgccgccgggatcagtttttccgccgcgctaacgcaataatccggcaggaacaccaccttcaacttatcgccaaccagcggatcgttgttgatcacgtcagccactttgttgatcgcaaagataatattcttcgccaggtagtagcccggtgccgctttcgcgccgaagaggaagacgcgcggtacgcgatcagcctgcgggttttcacgaatttctttgtacaacgccagaatatgcagcagattcaggtgctggcgtttgtactcatgcaaacgtttgatctgaatatcgaaaatcgcctgtggattgatctcaataccggtacgaactttcacaaactccgccagacggactttattcgcctgcttgatctcgcgatattgctgacggaatttcgcatcatcagcgaatttttccagattgatcagctgatcgagatcgttagcccactctttttgcagacttttatccaacagagccgccagtgccgggttgcactgtttgatccagcgacgtggggtaataccgttggtgacgttatggaatttgttcggccatagctggtgatattccgggaacagatctttcaccaccagatcgctgtgcagcgccgcaacaccgttcaccgcgaaaccgccaaccacacacaggttcgccatatgcacttgtttgtcgtgcaccaccgccagtttggcccacactttttcatcgcccggccaggttttctctaccagcgttttaaagcgagtattaatttcgttaataatctgcatgtggcgcggcagtaagcctttcaccagtttcacatcccagcgttccagcgcttctggcatcagggtatggttggtgtaagcgaaagttttgctggtaatggcccaggcgtcatcccagctcatctggtgctcatcgatcagcacgcgcagcagttctggaatcgcgatagttgggtgggtatcgttcagctgaataacttcgtaatccgccagttcgtgcagtttacgccccgccagatgatggcgacgcaaaatatccgctacgctacaggcacactggaagtattgctgcatcaggcgcagctttttaccggcagtatggttgtcgtttggatagagaactttggtcagtttttccgcattgatgccctgctgttcggcacgcaagaaatcaccgtcgttaaatttagtcagatcaaacggatgcgcgtgcgtcgcctgccacagacgcagcggctgcgccacgccattacgatagccgacaacggggagatcccacgcttgaccggtaatggtaaactccggctcccagcgtccgtctttcgtcactttaccgccaatccctacctgcacatccagtgcttcgttgtggcggaaccacgggtagttactgcgatgccagtcatccggcgcttcaacctgtttgccatcgacaaaagactggcggaacaaaccatattgatagttcagaccgtaacccgtcgcagactgaccgacagttgccatactgtcgaggaagcacgccgccagacgtcccagaccaccgttacccagcgccgggtcgatctcttcttccagcaggtccgtcagattgatgtcataagccttcaagctatcctgtacatcctgataccagccgagattcaacaggttgttgcccgtcaggcgaccaatcaaaaactccatactgatgtagttaacatgtcgctgattcgccaccggcttggcgaatggctgagcacgcagcatttcggccagtgcttcactcactgctagccaccactggcgaggagtcatttcagccgcagaatttaagccataacgctgccactgacgactaagcgcttcctgaaattgcttatcgttaaaaataggttgactcataggagttccacttttcttagattttcaacacaacgttatcgctagtttgccaggctcgatgttgaccttcctcatcctgcgggggattaggcagggaggagttgcggggatgagcaaggaaatgtgatctcaaccacttaaagctagtgcaaaccacaggattagcatcaaatcaatgcaatacagcgcagaaaatctgtatctaagtgcaaaaaatggccgttgcgtattttcaaaaagcggaaggtaactctataaattaagtaaaggagtgaaacagtttcataagtaaaatatccagtgtgctccatctcattcttaatagatttattaagatcatctttttagatggcactttcatcaggaatgaagaagaaacccttgcttaaatgaatctgatgaacataagggaaaccagtattcacgctggatcagcgtcgttttaggtgagttgttaataaagatttggaattgtgacacagtgcaaattcagacacataaaaaaacgtcatcgcttgcattagaaaggtttctggccgaccttataaccattaattacgaagcgcaaaaaaaataatatttcctcattttccacagtgaagtgattaactatgctgattccgagtaaactaagtcgtccggttcgactcgaccataccgtggttcgtgagcgcctgctggctaaactttccggcgcgaacaacttccggctggcgctgatcacgagtcctgcgggctacggaaagaccaccctcatttcccagtgggcggcaggcaaaaacgatatcggctggtacagcctggatgaaggtgataaccagcaagagcgtttcgccagctatctcattgccgccgtgcagcaggcaaccaacggtcactgtgcgatatgtgagacgatggcgcaaaaacggcaatatgccagcctgacgagtctcttcgcccagcttttcattgagctggcggaatggcatagcccactttatctggtcatcgatgactatcatctgatcactaatccagtgatccacgagagtatgcgcttctttattcgccatcaaccagaaaatctcaccctggtggtgttgagtcgcaaccttccgcaactgggcattgccaatctgcgtgttcgtgatcaactgctggaaattggcagtcagcaactggcatttacccatcaggaagcgaagcagttttttgattgccgtctgagtagcccgattgaagccgcagaaagcagtcggatttgcgatgacgtttccggttgggcgacggcactacagctaatcgccctctccgcccggcagaatacccacagtgcccataagagcgcacgccgcctggcgggaatcaatgccagccatcttagcgattatctggtcgatgaggttttggataacgtcgatctcgcaacgcgccattttctgttgaaaagcgccattttgcgcagtatgaacgatgccctcatcacccgtgtgaccggcgaagaaaacgggcaaatgcgcctcgaagagattgagcgtcaggggctgtttttacagcggatggatgataccggcgagtggttctgctatcacccgctgtttggtaacttcctgcgccagcgctgccagtgggaactggcggcggagctgccggaaatccaccgtgccgccgcagaaagctggatggcccagggatttcccagcgaagcaattcatcatgcgctggcggcaggcgatgcgctgatgctgcgcgatattctgcttaatcacgcctggagtctgttcaaccatagcgaactgagcctgctggaagagagccttaaggccctgccgtgggacagcttgctggaaaatccgcagttggtgttattgcaggcgtggctgatgcaaagccaacatcgctacggcgaagttaacaccctgctagcccgtgctgaacatgaaatcaaggacatcagagaagacaccatgcacgcagaatttaacgctctgcgcgcccaggtggcgattaacgatggtaatccggatgaagcggaacggctggcaaaactggcactggaagagctgccgccgggctggttctatagccgcattgtggcaaccagcgtgctgggtgaagtgctgcactgcaaaggcgaattgacccgcagtctggcgctaatgcagcaaaccgaacagatggcacgccagcacgatgtctggcactacgctttgtggagtttaatccagcaaagtgaaattctgtttgcccaagggttcctgcaaaccgcgtgggaaacgcaggaaaaagcattccagctgatcaacgagcagcatctggaacagctgccaatgcatgagtttctggtgcgcattcgtgcgcagctgttatgggcctgggcgcggctggatgaagccgaagcgagcgcgcgtagcgggattgaagtcttgagctcttatcagccacagcaacagcttcagtgcctggcaatgttgattcaatgcagcctggcccgtggtgatttagataacgcccgtagccagctgaaccgtctggaaaacctgctggggaatggcaaatatcacagcgactggatctctaacgccaacaaagtccgggtgatttactggcaaatgaccggcgataaagccgccgctgccaactggttgcgtcatacggctaaaccagagtttgcgaacaaccacttcctgcaaggtcaatggcgcaacattgcccgtgcacaaatcttgctgggcgagtttgaaccggcagaaattgttctcgaagaactcaatgaaaatgcccggagtctgcggttgatgagcgatctcaaccgtaacctgttgctgcttaatcaactgtactggcaggccggacgtaaaagtgacgcccagcgcgtgttgctggacgcattaaaactggcgaatcgcaccggatttatcagccattttgtcatcgaaggcgaagcgatggcgcaacaactgcgtcagctgattcagcttaatacgctgccggaactggaacagcatcgcgcgcagcgtattctgcgagaaatcaatcaacatcatcggcataaattcgcccatttcgatgagaatttcgttgaacgtctgctaaatcatcctgaagtacctgaactgatccgcaccagcccgctgacgcaacgtgaatggcaggtactggggctgatctactctggttacagcaatgagcaaattgccggagaactggaagtcgcggcaaccaccatcaaaacgcatatccgcaatctgtatcagaaactcggcgtggcccatcgccaggatgcggtacaacacgcccagcaattgctgaagatgatggggtacggcgtgtaagtttagccggataacgcgccagatccggcttacatctctgcatcattcaatgctcacccgcgttacgccatctgtttctatcaaactaaaccgcaccggcaagaaacgctccaccaccgcgatattggtcagcagatggcaactgggatgggcgaccgtaaattcccccgcgcccgccagcgccatcggtagcaccagttggtcagcaagatattcccccaccgccgccgtgcttgccaggtagcgtttcacctctttcaccaactgtgccgcaaccacctcggcactgacgcgcttttcaccgacgacaaaaaagcgttcggtgatattttcactttcgacttcaaggctgacggtattacccggcccctggtcgcgcggcaggttatgaatattctgttcatgcagggaaaaactccccgccagtgtagcgatttcacgctcagcaacatggcgcggcacaccagctaatagaacttctccacgcatctgcacaatgttcccgcgctcgccaagttgcaaggtgttaaagcttgccacggggctgacttccgttgccaccacaccgcctccggcagggtaaaaaccgtggcgtaacagcgtggtttgctgatgaattcctattttcgccagcagcggctccagcacccggcggataaaatccgcaggcggcgcgctcgggttatcggtgccgccgctcacttcaacacggctaggtccatcggcaaaccacagcgcgggcagcaccgtttgcagcaccagcgtacaacttccggcgctaccgatagcaaagcggtaatcgccgccgcgcacggtgccgggccggaagagcagacgctggctccccagctccgcgccttccacggttgctccgcaaatttccgtcgccgcctttaccgcggtcagatgctggcgcaacagccccggtttcgcccgcccggcacgaatgctggtgatggtaaatggctggccggttatcatgctcaggctcagcgcgctgcgcaggatctgcccgccaccttcgccctgtgcgccatccagcgcaatcatccttttcatcatttatccttttacgcacaccacctgacgcagggtatagataacttccaccagatcgctttgtgccgccatcaccgcatcaatatctttatacgccatcgggatttcgtcgatcacttcggcatctttacggcattccacatgcgcggtggcacgaatttgatcttccacgctgaacagttttttcgctttagttcggctcattacccgcccggcaccgtggctgcagctacagaagctctcttcatttcccagcccacggacgataaagctttttgctcccatgctaccgggaataattccatattgaccagcacgcgcagacaccgcgcctttacgcgtcacgtagatctcttcaccaaagtgctgttctttttgcacatagttgtggtgacagttgatctcttccatcgccagcgtttgtggctgtctgaccgttttctgcgtaatgctctgcaatgccgttaccacgttttccatcatcgcatcgcggttaaggctggcaaaaagctgcgcccaggccacggctttcaggtaatcatcaaagtattccgtaccttccataaagtacgccagatcacggctcggcaacgtctcaagcgtttcctgcatctctttttgtgccagatcgataaagtaagtcccgatggcgttaccaattccgcgactaccggagtgcagcataatccacacctggtcgctctcatcaaggcagatttcaataaagtggttaccggttcccagcgttcccaggtgtttatagttattggtattcaggaaacggggatatttttgcgttaaccactgataaccggcttcaagctcagcccatttagcatcgacgttaacaggtggattttcccaggcacctttatcacgtttacaacggccagtggtacgcccgtgcggcacggccgtttcaatcgcctgacgcagctctgccaggttttcaggcaggtcttccgccgttaacgcggtacgcagcgcgttcattccacagccaatatccacgcccaccgccgccggaataatcgcccctttggtcgggatcacgctaccaatggtggaacctttacccaggtgtacatcaggcattaccgcaatatgtttgaaaataaacggcatcttcgccgtattaataagttgctgacgcgcatcggcctctaccggcacgcctttggtccacatttttaccggggcattttcagtggtcagtaattcgtaattcattttgtttttctcttttcgttgtttgctgtcctgataattgcaaccgtcgtgccagaaaattaaataagcagcttaattttttaattcattgttttaaaaaagattatatctttacgtccgtaaccggagatttcccgcaaagccaatttaccgataatgaaatatcgtcttttataaggatatctaagatgcgtaaaacagtggcttttggctttgtcggtaccgtactggattatgccgggcgcggcagtcagcgctggagtaaatggcgtccgacactctgtttatgccagcaagaaagcttggtcatcgatcgactggaattgttgcacgacgcccgcagccgcagcctatttgaaacgcttaaacgcgatatcgccagtgttagcccagaaacagaagtggtgagcgttgagattgaactgcataacccgtgggatttcgaagaggtctacgcctgcctgcatgatttcgcccgtggttacgagtttcagccagaaaaagaagactatttaattcacatcaccaccggtacccacgtcgcgcagatttgctggtttctgctggcagaagcgcgttacctgcccgcccggctgatacaatctagtcctccgcgcaaaaaagaacagccgcgcggcccaggtgaagtaacgattatcgatctcgatttaagccgttataacgccatcgccagccgctttgccgaggaacgccagcaaacgcttgattttcttaagtccggcattgccacgcgtaacccccacttcaaccgcatgattgagcagatcgaaaaagtggcgatcaaatcccgcgcgccgattctgcttaacggtccaaccggcgcgggcaagagttttctggcgcgacgcatcttagagttaaaacaggcgcggcatcagtttagcggcgcgtttgtggaagtgaactgcgccaccctgcgcggcgataccgccatgagcacgctgtttggtcatgtaaaaggcgcgtttaccggggcgcgggaatctcgtgaaggtttattacgcagcgccaacggcggaatgttgtttcttgatgagattggcgaactgggcgcagacgaacaggcaatgctgctgaaagccattgaagagaaaaccttttacccgtttggcagcgatcgccaggtgagcagtgattttcagcttatcgccggaacggtgcgcgatttgcgccagctggttgccgaaggcaaatttcgcgaagatctgtacgcgcggatcaatctctggaccttcaccctgccgggtctacgccagcgccaggaagatattgaaccgaacctggattatgaagtggagcgccacgccagtctcactggcgacagcgtgcgttttaacaccgaagcgcggcgcgcctggttggcttttgcgacctctccccaggcaacatggcgcggtaactttcgcgaactttctgccagcgtcacgcggatggccacctttgccactagcggacgcatcactctggacgtggttgaagatgagataaaccgtctgcgctataactggcaggagagccgcccctccgcgcttacggcgttgctgggcgcagaggcagaaaacatcgatctcttcgaccgtatgcaactggaacacgttatcgctatctgccgccaggcaaagagcctttccgcagccggacgccagctttttgacgttagccgccagggcaaagccagcgtcaatgacgcggatcggctacgcaaatacctggcgcgttttggtctgacgtgggaagccgtgcaggatcagcacagctccagttgaatatggtggtccgtcagcacctgcatcacgcttactggcggcggggcgtcggtgtagacggcatctaccatgctgatgctgcccatattgaccatcgcgttacggccaaatttcgagtgatcgacaaccagcataacgtggcgcgagttctcaataatggcgcgtttggtgcgaacttcgtggtaatcgaactccagcagcgagccgtcgctatcgatgccgcttatccccagaatgccgaaatcaaggcggaactgggagataaaatcgagcgtcgcttcgccaatgatcccgccatcgcggctgcgtaattcgccaccggcgagaatgatgcgaaaatcttcttttaccatcaacgtgttagcaacgttgagattgttggtgacaatgcgcaaattgctgtgattgagcagtgcgtgcgctaccgcttccggcgtggtgccgatatcgataaacagcgtcgagccattggggatttgctccgccactttgcgggcgatgcgctctttttcttcggtctgggtggccttgcgatcgtgccacggcgtgttaaccgaactggaaggcagcgccgcaccgccatgatggccaggatcaggttttgctccgccagctcattgaggtcgcggcgaatagtctgcgggctgacggagaaatgctctaccagctcttcggtactgacataaccctgctgtttaaccagttcgataataccgttgtgacgttgtgtttgtttcatttataaatccctggaattattttcgttttcgcgcattgaggctatcaacaaaagccatcgctaaacccacggctaacccggcgatgtgtgctccgttcgccatgctcatcccaaacaaatcaaaccatccggcgacaatccagatcagcgcaaagataattaacccacgttgcaggtaaatgccactttgcggatcgcgttcgccacgtagccagacgtagcccatcagcgcatacaccacgccagaaagcccgccaaaccacggcccgctgaatttttgctgcacatagccgcttaacagggcgctgataagcgtaatgacaattagcttaccgctaccgaggcgtttttccaccgcaccgccgagataccaccaccagagcaggttaaagaggatatgcatcaggctgaagtgcattaacgcgtgggtgaagtaacgccagaactcaaatttcagtgttggatcgaatggccaggccagccataacatcacttcctgatcgccgagaatttgcatggcaataaacaccaccacgcaggcgatcatcatcacccaggttaccggacctgcgcgttcacgcaaggcggcaaagaaaggataacggcgataatgcaggccactgccggtatggcctgcctgccagctcgccgccagataacgcggatctgccgggttttcgagaaaacgcgccagctccgcccgtacgcgctcggcctgggactcatccgccagccagacatcgctttggttatgttgttgaatcgtgaggataacaccctgcgtcgccatgtaatcaacaaacgcctgcgccacgcgggggttagcaaaagaggtaatcatcaacatcgttgctgtcgcttattccacacaaaaggggacagtataaagcgttacgcgccgtacgccacctctgcgggaaactgacgttgccaggcttcaaagccgccgtcaatgctatagaccacatcgtagccctgttgcagcagatactgcgccgcgcctttgctgctattgccgtgataacacatcaccatcaccggagtgtcaaagtcgttatcacgcataaaagcgcccagcgtgtcgttggttaaatggaaagcctgcaccgcatgtcccattgcgaaactctgtggatcgcgaatatcgaccagcaccgcctctttttcctgcaacttctggtgcgcgtcggcaacgttaatacattcgaactgatccatgcgtctctctttctttacaaacaagtgggcaaatttaccgcacagtttacgtcgaagcggcagataaacgccataatgttatacatatcactctaaaatgttttttcaatgttacctaaagcgcgattctttgctaatatgttcgataacgaacatttatgagctttaacgaaagtgaatgagggcagcatggaaaccaaagatctgattgtgatagggggcggcatcaatggtgctggtatcgcggcagacgccgctggacgcggtttatccgtgctgatgctggaggcgcaggatctcgcttgcgcgacctcttccgccagtagtaaactcattcacggtggcctgcgctaccttgagcactatgaattccgcctggtcagcgaggcgctggctgaacgtgaagtgctgctgaaaatggccccgcatatcgccttcccgatgcgttttcgcctgccacatcgtccgcatctgcgcccggcgtggatgattcgcattggtctgtttatgtacgatcatctgggtaaacgcaccagcttgccgggaagtactggtttgcgttttggcgcaaatagtgtgttaaaaccggaaattaagcgcggattcgaatattctgactgttgggtagacgacgcccgtctggtactcgccaacgcccagatggtggtgcgtaaaggcggcgaagtgcttactcggactcgcgccacctctgctcgccgcgaaaacggcctgtggattgtggaagcggaagatatcgataccggcaaaaaatatagctggcaagcgcgcggcttggttaacgccaccggcccgtgggtgaaacagttcttcgacgacgggatgcatctgcctagcccttatggcattcgcctgatcaaaggcagccatattgtggtgccgcgcgtgcatacccagaagcaagcctacattctgcaaaacgaagataaacgtattgtgttcgtgatcccgtggatggacgagttttccatcatcggcactaccgatgtcgagtacaaaggcgatccgaaagcggtgaagattgaagagagtgaaatcaattacctgctgaatgtgtataacacgcactttaaaaagcagttaagccgtgacgatatcgtctggacctactccggtgtgcgtccgctgtgtgatgatgagtccgacagcccgcaggctattacccgtgattacacccttgatattcatgatgaaaatggcaaagcaccgctgctgagcgtattcggcggtaagctgaccacctaccgaaaactggcggaacatgcgctggaaaaactaacgccgtattatcagggtattggcccggcatggacgaaagagagtgtgctaccgggtggcgccattgaaggcgaccgcgacgattatgccgctcgcctgcgccgccgctatccgttcctgactgaaagcctggcgcgtcattacgctcgcacttacggcagcaacagcgagctgctgctcggcaatgcgggaacggtaagcgatctcggggaagatttcggtcatgagttctacgaagcggagctgaaatacctggtggatcacgaatgggtccgccgcgccgacgacgccctgtggcgtcgcacaaaacaaggcatgtggctaaatgcggatcaacaatctcgtgtgagtcagtggctggtggagtatacgcagcagaggttaagcctggcgagctaaattaacgtaaggtgatcaggtcagatttcaatctggcctgagactgatgacaaacacaaaactgcctgatgcgctacgcttatcaggcctacgtggtttatgcaatatattgaatttgcatggtcttgtaggccagataagacgttcacgtcgcatccggcatgaacaaagcgcactttgtcaaaaatctaacctactttttaattcagggaattaccgcaaagcccacgccatcatacccaacgtaacaaaactcaggcacgttccccactcgcccgctgaaaaatagcattaatgcgcccagcgccagcataaaaattttgagcagaaggtaaattgttggcgtgataaggatattacaaacttcaataataccggcaagtccgacacccagcatggcaataaccaccgccaaaaattgcgccagtatggggatgccgaaaaaagtcattaccaggctggtcaaaatccattttctgttttgcattattctttccattctttttgaatggtgaaattatactccccgagtccccttgccccttctggacacttttccgaaatgatggcggaaaaaaacgggaccctttggccccgttctatttattggtgaacttacaatctcaccggatcgatatgccagatatgatcggcgtactctttgatagtacggtcagaagagaagtagcccatattggcaatgttcagcatcgcttttgcggtccactcttcctgaagctcgtagagttcatcgactttatcctgacaatcgacatagctgcgataatccgccagtacctggtagtgatcgccgaagttgatcaggctatcaaccagatcgcgatagcgacccggatcttccggactgaatacaccgctgccgatttgcgtcagcacctgatgcagctcctcatctttctcgtagtattcacgcggtttgtagccctgacgacgcagttcttccacttcttccgctgtgttaccaaaaataaagatattgtcagcaccgacatgatccagcatctcgacattcgcaccgtccaacgtaccgatagtcagcgcaccgttaagcgcaaacttcatgttactggtgccggaagcttccgtccctgccaggctaatctgttcagacagatctgccgccggaatgatcaactgcgccaggctaacgctgtagttcgggatgaacacgactttcagcttatcgccaatctgcggatcgttgttgatcactttcgctacgtcattgatcaaatgaataatgtgcttcgccatgtaataggcgctagccgccttaccgccaaaaatattcacgcgcggtacccacttcgcatccgggtcggccttgatgcggttatagcgggtaatcacatgcaacacattcatcaattgacgtttgtattcgtgaatacgtttgatttgtacatcgaacaacgcctttggattcaccaccacattcagctgctgggcgatatactctgccagacgctttttgttctccagcttcgcctgatgcacagcgtgattaaccattgggaaatcacagtgttgttgcagctcattaagcaggctaaggtcggtgcgccagttacggcccaggtgttcgtccagcacggcactaaggcttgggttcgctaccgccagccagcgacgcggcgtcacaccgttggtgacgttggtgaaacgacccgggaagattttcgcaaagtcggcaaacaagctttgcaccatcagattagagtgcagttcgcttacaccgttaactttgtggctcacaacaaccgccagccaggccatacgcacacgacgaccgttggattcatcaatgatgctcgcccgtcccagcagatcggtatcgttcggatactgttcctgcaaggttttcaggaaatagtcgttgatttcaaagatgatctgcaggtgacgcggcagaattttacccagcatatcaaccggccaggtttccagcgcctcgctcatcagcgtgtggttagtgtaggagaagacctgacaacacacctcaaacgcgtcgtcccagctaaattggtgctcatcgatcagcagacgcatcatctcaggaatgctcagtaccggatgggtatcattgagatgaatcgcgattttatccgccaggttatcgtaggttttatgcaactgataatggcggcttaaaatgtcctgaatggtgctggaaaccaggaagtattcctgacgcaggcgcagctcacgcccggagtaggtggagtcatccggatacagtacgcgagatacgttctcggagtggtttttatcttccactgccgcgaagtagtcaccctggttgaatttaccgaggttaatttcgctactggcttgcgcactccacaaacgcagcgtgttggtcgcgtcggtgtcgtaaccagggattatctgatcgtaagcgactcccagaatctcttcggtttcaatccagcgcgtttttttaccttcctgctgaatgcgaccgccaaaacggactttatagcgcgtgttgtggcgtttgaattcccacgggttaccgtattccagccagtagtctgggctctctttctggctaccgttaacgatgttctgcttgaacataccgtagtcatagcggatgccgtaaccgcgccccggcaaccctaacgtcgccagagaatcaaggaagcaagccgccagacgtcccaggccaccgttaccgaggcctgggtcattttcttcatcaatcagctcttcgagatttaaccccatcgcttccagtgcgccctgtacatcttcgtaaattcctaggctcaacatggcgttggagagcgtacggccaatcaaaaactccatgctcaggtagtaaacctgacgagtttcttggctcaactgggcacggttactacgtaaccagcgctccacgagacgatcgcgcacagcaaataacgttgcgttcagccattcatgtttattggcgacgaccgggtcctttccaatcgtaaacatcagcttgtaagcgatagagtgcttaagagcttctacgctaagcgtggggctactatatgtaaacggagcattcatataggcgtttcctgaaaattatttcaagcgatagtaaagctcacggtagctcttcgccgcgacctgccagctaaaatccattgccatagcctgacgttgcacaaaccgccacagactaggacgggaccacagtacaaaagcacgtcgaatagcccgtaacaggctccaggcattactatcttcaaagacaaacccactggcgacgccatctgcaaggttctcaagagaacagtcagaaaccgtatcagcaagcccaccggtgcgccgcactaacggcagcgtaccgtacttcaatccataaagttgcgttaagccgcacggttcaaaacggctgggcaccagaatgacgtccgcgccgcccataatgcgatggctaaatgcttcgtgatagccaatctgaacgcccacctgaccggggtattccgctgccgccgcaaggaaaccttcctgcagcaccggatcgcccgcgccgagtagcgccagctgcccgccctgctccagaagacccggtaaggcttccagcaccaggtcgagacctttctggctggtcagacggctcaccactgcaaaaagcggcactttatcgtcaaccttaagccccattgcgatttgtaactggcgcttattttccgctttatcttccaacgtatcgcgggtgtaacggctggccaacagtaagtccgtctctggactccagattttctcgtccacgccgttcagtacgccggaaagacgcccttcacggtgacgctgttgcaacagaccttccataccgtaggcaaactgcggttcggtgatctcgcgagcgtaggttggactgaccgccgtaatgtgatcggcatagtacagaccggccttcaggaaagagatttgtccgttgaattccagcccatgaatattaaagaaactccatggcaattggatgtcattcatgtgatgtgcataaaacatgccttgataggccaggttgtgcacagtaaacacgctcttcgccggacgcccgcgcgccgccagatacgcaggcgcaaggcctgcatgccagtcgtgcgcatgcaccacatcaggacgccagaatgggtcaagcccgctggccatttctgccccaacccaccccagcagcgcaaaacgcaatacgttgtcggtataggcaaataagttggtatcgtgatacgggcttcccggacgatcatagagatgcggcgcgtcaatcaggtaaatgccaaccccgttgtaatgaccgaacaacagcgtgatatgtccggcgaaggtatcacgacgggatactacctgcgcatcggtcacgccacggcgaatatcgggaaatgcaggcaacagtacgcgagcgtcaacgccgtctgcgatttgtgctgcgggtaatgccccaataacatcagccagaccgccggttttaagcagcgggaacatctcactacatacatgtaaaacctgcattatcgctcctgtttatgccctaacttccgtagcatttcgcgcgttaccagcacgatgccttcttcactacgatagaaacgacgtgcatcttcctctgcgttttcaccaatcaccatgccttccggaataacacaagcacgatcgatgacgcagcggcgcagacggcagctgcgacctacccatacttccggtaacaatacggcggaatcaatgttgcagaaactattcacgcgaacgcggctgaacagaacggactgcaccaccacgctaccggagatcacacaaccgccggaaaccagactgttaagggtcatcccgtggctaccggagcgatcctgcacgaatttcgctggcggtaaactttcattgtaggtgcgaattggccaattgcgatcgtacatatccagttccggcaccacagaggccagatcgaggttcgctttccagtaagcttccagcgtacccacatcgcgccagtacggctcggcatccgggtcggattgtacgcaagagagcgggaacgggtgcgcataggccagaccggcttcggtgatcttgggaatcaaatctttgccaaagtcgtggctggagttctcatcgcgatcgtcttcttccagcagttcatacagatagtcggcgtcaaagacgtagatacccatactcgccagagatttgctcggatcgttcggcatactcggcgggttagcaggtttttcaacgaattcgataattttatcgttctcatcaaccgccataacgccaaatgcggaggcttcttcaatcggtactggcatacaagcaacggtgcaacgtgcgcctttttcgacgtgatcgataagcatacggctgtagtcttgcttgtagatatggtcgcccgccaggatcaccacgtattccgctttataacggcggataatgtcgaggttttgggtgaccgcatctgcggtgccgcgataccagttttcccctttcattctctgctgtgctggcagcagatcgacaaactcgttcatttcttcattgaagaaactccagccgcgctgaatgtgctgcaccagagtgtgggactggtactgggtgatcacgcccatacgacggatcccggagttgatgcagttagacagcgcaaagtcgataatgcggaacttaccgccgaagtgtacggccggttttgctcgcttattggttaaatccttcaggcgggtaccacgtcctcccgccagtatcagggcaacagatttcaatggcagctggcgcgccaacattaagtgatcgttcttctctaaactaaccatgactaactccttttttatcatctctggaacacacacaatccgtgtgcaggtccctgccagacagccgtaatcactgggttatcctctccagcgaatgggggaatggcgtgccactccccagcaggtaaaacaatctctgttacctcaagcgtggcgttaattgcgatcaaaaagcgatcgctgagcagaatttgcagctgtttcggcccgttttgccactcatccgtgcttaaaggttgagcatatcgatttagccaacggacattgccgtcgccttcttcccaccagcgattctccaccaaagcgggaatgcgcttgcgcagatggattaacgcggcggtaaatgcggttaaaccactgcttgcctggctccagtccaaccaggttaattggttatcctgacagtaggcattgttattgccatgctggctgtgaccatgttcgtcaccggccagtaacatcggcgtaccctgggagagcaacaacgttgttaacagggcgtgaatgctgtcgcgccgccgttcaaccaggtcaagagaaccgcctaacccttctttaccatgattgttactgtaattgttgttggtcccgtcgcgattttcttctccgtttgcttcattgtgtttatggttgaagcaaacgcagtcgcgaagcgtaaaaccgtcatgcgcggtgacgagattaatcgcggcactcggcagacgaccattacgtttaaaaacatcgctggaggcagcaaaacgcccggcaaacgcccccagaggcaaatcataatgtagccagaaacgacgggcagcatcgcggaaatgatcgttccactcggcaaacagcggcgggaaatttcccacctgataaccaccaggagcgatatcccacggttcagcaattaacttcacctggctgagcaccgggcagttctggatagcggtaaacaacggcgcatcctgacggaactctggcgtacggcccatgactgccgccagatcaaagcggaaaccatcgacgtggcaggtttctacccaataacgcaggcaggcgctggcataatccaccaccgccggatgactcaaattgagcgtgttgccgcaaccggtccagttgtgataatcgccgtcttctcttatccaataatagctacggttatcgatcccacgcaggctgaataacgggccgtcgaggtccagttccgcactatggttgagcacgatatcaagaatgacttcgatacccgctttatgcagtgctttgattgcatcgcgaaactcatccagcgccgtttctgggctgcaggcatacgccggatgcagcgcaaacatcgccaccgggttgtaaccccagtagttacttagccccatgcgttgcagacgtggttcactggcaaactgcgccactggcagcagttccagcgcggtaatgcccaattgtttcaaatagttgatcatcaccggatgcccgagggctttataagtgccacggatctcgaccgggatctccgggtgcaagtacgttaatcctttgacatgggcttcataaatgatggtgctgccccacggcgtgcgcggcggggcatcatcttcccagtcatagtgatcaaccaccactacgcatttcggcgcaatggcggcgttgtcgcgatagtcaggttcattatgaccggcgtgcagcagcgggttatctttaaactccccgtcaatttgccgcgcgcaaggatcaatcaacaacttcgccgggttaaagcgatgcccctcggcgggttgccaggggccatgaacgcgataaccataacgcaaacccgggcgcgcatccggcagataaccgtgccaaatgtcgccactgtgccctggcaagtcatagcgatgttcctggccattggcgtcaaagacacacagttctacccgctcggcatgagcggagaaaagtgtgaagttgacgccctgaccgtcgtaatgcgcgccgaggggagcgggtttgccaatggcgagttgtgtcattctgcctcccgaaccagccagatagtggccagcggtggtagcgtcaggcttagactatgctgacgaccgtggctggcaatctcatcgctgtgtaccgtgccgccattgcctgcattactgccgtgatagtgcatggaatcggtattgaggatttcacgccatttgcccggctggtttatgccgaagcgataatcatgacgcggtaccggcgtaaagttactggcaacgatgatttcgttaccctctttatcgcgacgcacaaagatcagcacgctgcgttctttgtcatccaccaccagccattcaaagccgtacgggtcaaaatccagttcatgcattgctttatggtggcggtaggtgaggttcagatcgcgcaccagacgctggacaccgtggtgccagttatcgccgccttccaacagatgccagtcgaggctggcgtcatggttccactcgcggccctgggcaaattcgttacccatgaacagtagtttcttgcccgggaatgcccacatccagccatagtaggcgcgcaggttcgcgaatttctgccatgcgtcgcccggcatgcggtcgagaatgctttttttaccgtggaccacttcatcatggctcaacggcaggacgaagttttcagtgtagttgtagagaatcccgaaggtcagtttatcgtgatgatactgacgataaaccgggtcgagcttcatgtagtccagggtgtcatgcatccagccgaggttccacttgtaccagaagcccagaccgcccatatcctgcggacgagaaacgccagggaaatcggtagactcctcagccattgtcaccgcaccggaaacctgctcaccaagaatacggttggtattacgcaagaattcaatcgcttcaagattctcgcgcccgccaaattcgttcgggatccactccccctctttacggctgtagtcgcgataaatcatactcgccaccgcatcgacgcgcagcgcatcaataccaaaacgttcaatccagtaaagcgcgttaccgacgaggaagttactgacttcacggcgaccatagttgtagatcagcgtgttccagtcctgatgatagccttcacgcggatcgctgtgttcatacaagttcgtgccatcaaattcggcaagcgcaaagtcatcagtcgggaagtggcctggcacccagtcgagaatcacgttcagaccagctgcgtgtgcggcatcaatgaaataacggaagtcgtcgcgagtaccaaaacggcgggttggcgcatacaggccggttggctgataaccccaactgccatcgaagggatgctcgttaatgggcagtagttcgaggtgggtaaagcccatccatttagcataaggcaccagttgatcggccagctcgcggtagctcaaccagaaattgttgtcggtgtggcgacgccaggaacccaggtgaacttcataaatagagattggcgcatcaaactgattcgcttttttgcgctcttcagtctgtacaaccttttccggcagcccgcaaataagagacgcggtttccgggcgcatttgcgcttcaaaggcataagggtcggacttcagacgcaagttgccattggcatcaatcatctcgtatttatagagctgaccgttatgcgccccagggataaacagttcccagatgccgctctctttacgcaggcgcatcgggtgacggcgaccgtcccagtagttgaattgcccaaccacgctgacccgacgggcgtttggagcccagacagagaaacgcgtacctgtgacgccatccatagtatctgcatgcgcgcctaaggtttcatacgggcgcaggtgagtaccttcagataatagccaggcatccatttcctggattagcggaccaaaacggtaaggatcatcaatcaggttttgctgaccatgccagacaacagccaactgatagcggaaaaaattcttacgtcgcggaatgacgccgctaaagaatccccgactgtcgagacactccagttttgcgagtttgcgcccggttttcggttcaatcacccacacatcggtagcgtcgggtaaaagggcacggacttccagtcccgcggtggttttatgcattcccagtacggaaaaaggatccgcaaaatggcctgcaattagcgcgttaatcacgtctctatcgatacgatcggacatgcttgtcttcctgttttattgtgtcaccccatccaattggatttttgacttctggttgtgacatttttttgacctgaacggcgcagcactctgtgcatcctctctgcgtcgtcctcacttcaggtaaggctgtgaatactcatgtattcagccacccttaaagaatagccaatgctctatttaactcccggtaaatcatgaaacatctgcgcttactcctgtattacgcactaacaggggcggcatcgcgccccagatttaatgaataaagattacgccagttgacgaagcatccgacgcagcggctccgcggccccccacagcagctggtcgcccacggtaaaggcactcaggaactctggtcccatattcagcttacgcaggcggcctaccggcgtggtcagcgtgccggtaacggcagctggggttagctcacgcatagtgatttcccgatcgttcggaacgactttcgcccacggattgtgcgcagccagcagttcttccacggtcggaatagacacatcttttttcaatttaatagtgaatgcctggctgtggcagcgcaatgccccgacacgcacacataaaccatctaccggaattacggaagatgtgttgaggatcttgttggtttccgcctgccctttccactcttcgcggctctgaccgttatcgagctgtttgtcgatccacggaatcaggctacccgccagcggcacgccaaagttatccaccggcagctcaccgctacgggttaaggttgtgactttgcgttcgatatcgagaatagcagaggacggggtcgcgagttcatctgccacatggccatacagatggcccatctgggttaataactcacgcatatgtcgcgcaccaccgccggaagcggcctggtaggttgcaacggacacccaatcaacaagatcattggcgaataaaccacccaagctcatcaacatcaggcttacggtacagttaccgccaacaaaagtcctgatgccattatttaatccgtcggtaatgacgtcctgattgacggggtcaagaatgatgatggcgtcatctttcatgcgcagagagcttgctgcgtcaatccagtaaccttgccatccgctttcacgaagctttggatagatttcgttggtataatcgccgccctgacaggtcacaatgatatcgagggcctttagcgcctccagatcaaaggcatcctgaagtgtgccagtggttccgccaaaagacggcgcagcctggccaagctgagaagtagaaaagaagacagggcgaatggcgtcgaagtcgcgctcttcaaccatgcgttgcatgagaacggagccgaccataccgcgccagccgataaaaccaacatttttcataagcgtttttttcctgcaaagatgtgtgctgtataaatgtgccggtctcctcttggcacatctttcaccatacaaaaagcagccaaagtcgcaagtgaaattaatcaatgatagcgaagccatcagtaatgcgacttatcctgctttgttagcacgcagaaagtccgcggcaattatcagggaatttgagttatgaatgaaatcatttctgcagcagttttattgatcctgattatggatccgctcggaaacctacctattttcatgtccgtactgaaacatactgaaccgaaaagacggcgggcaatcatggtgcgagagttgcttattgctctcctggtgatgctggtgttcctgtttgcgggtgagaaaattctggcatttcttagcctacgagcagaaaccgtctccatttctggcggcatcattctgtttctgatcgccattaaaatgattttccccagcgctagtggaaatagcagcgggcttccggcaggtgaagagccatttatcgtgccgttggcaattccgttagtcgccgggccgactattctcgccacgctgatgttgttgtctcatcagtacccgaatcagatggggcatctggtgattgctctgctgctggcctggggcggcacctttgtcatcctgctacagtctagcctatttttacgtctgctgggcgagaaaggggtgaacgcacttgaacgcctgatgggattgattctggtgatgatggcaacccagatgttcctcgacggcattcgaatgtggatgaaggggtaacgaggagagtttttcgaaaagaacccggtagcgtcacaactaccgggcgaacaaacttaactcaacagctggaacgcaatcatcccaacgatggcaccgacagtgccgaggatggtttccatcatggtccaggttttcagcgtttcggcttcggtcgcgccggtaaatttaccgaacaaccagaaaccggcgtcgttaacgtggctgacaacaatgctaccaccagcgatacaaatgctcagcgccgccatttgcgcaccggagtagttcagttgttcaataaccggcatcaccagtcctaccgccgttaaacaggctacggtggcagaaccctgaatgatgcgcactgcagctgccagcacgaagcaggtgatagcaatcggcaggcccatgccggttaacgcttcgcccagtgccggacctacgccagagtcaaccagcacctgtttgaacacgccgcccgcaccaatcaccagcagaatgatccccgccggttgcagcgcgtgaccgcaaatctccatcactttgtcttttggcatgccctgacgcattgccagaccgtaaatcgccaccagacaagcaaccagaatcgcggtaaacggatgaccgataaactcaaaccattcgtaagcagtacttccttccggcacaaaacgcgcggcaatggttttcagccctaccagcaccagcggcagcaggatcaggctcaggctgaatccgaaagatggcattttgccttcgccgagatgcggttcgctgatgtcgtcaggaatatgcagctcaacgtaacggctgatgaagttaccccacagcggcccggcaataatcattcccggaattgccgcacacaggccaatcaggatcatccagccaaagtcggcattcatctggcttgccagcagcatcggcgctggtccaggcaccagaaatgccgccgctgccgccacgcctgcaaataatgggattaccagcttcaccaggttcgtaccggtgtggcgcgccatactgaaagcaacgctaatcagcagaactatcgccacttcaaagaacagcggtagcgcacagaccagccccgcaaggccgatggcataatgcgcgcggctgtgaccgaaggatttgagcattttgacggcaatctgatcgactgcgccggtttcatgtaagatcttgccaaacatagctcccagggcgacaaccaccgccaggaagccgagggtgcctcccatccctttttccatcgtcgctgcgattttatcgagcggcataccagaaaaaaggccagcccccatggacaccaccattaaagccaggaaagcgtgcatacgcgccttcatgactaaaaacagcagcagtaaaacagaccctactgctgttaaaacaagcgttaatgtagtcactacttatttgccttttttaataacctcaatggtgcttgccacaacaccttccagcggttgatcgatatccaccaccagtacatcggtttcgtccgcacccggctcctgcagcgtttcaaactgcgtcaccaacatttgggttttaaagaaatggcctttgcgcgctttcaggcggatttcaatcacatcaaaatcgcctttcaaatagatgaaagagagattcggattaccttcacgcagcaagtcgcgatagtgttttttcaatgcagaacagacgatcaggctcactttattagtgcgctgcatagcaaacgcggcgtcgttcagcgcctgcaaccacggtttgcgatcgtcgtcattcagtggttcgccagacgccattttttcgatattgcgccgtggatggaggaaatcgccatcaagaaacgcggcatgaagttgatgcgccacttcactggcgaccgcagatttgccgctgccgcttacgcccatcaagacgtaaatgtggtgatcatggttagtcgtgctcaaagtggtgcccccacaatacaagaattaaaaatgttacgggtaactgttatcggtaacattgtccagccggacaatatcagaagcaatatccatccatgccttaagtgtataagtgtgagctacttcaaatttgtgggcttaaatagatccgcccggactcaaggtgaaacctaaatctaacattttcggtgtcacagattcgccacgaatacgcgccagcaggcgttcagcgccaatactgcccatccgctcacgcggcgtcagcacgctcgcaagtcgtggctccatcacctgaccaatgtcatgaccgtggaaaccggcaatcgccatatcgtcaggaacttttaaccccagacgctgacattcaaacgccgcgccgaccgccaggtcatcattcgtacagaacacgccatccagctgcggatattcccgccgcgcctggcgaatcagttcaataccggaagagtaagaagaagattgctcaaccatcacgctatatggcaccaggcctgcatccagcatcgcctgttcgtatcccttctgtttgatgatagtacgttcgtcgagacgtgcgccgagataggcaatgtggcgatgcccgcgagcaataatggcagtggtcatctggcgtgctgcttcaaagttatcaaaaccgacggcgatatcaaggcatgggctcttgctgtccatcagttccaccacgggaatacccgccacttcaatcatctttaaggtgcgcggcgtgtgggtacgttcggtgaggatcaggccgtcgatattccaggagagcatggattcgaggcgttcttgctccatttccggtttataaccgtagtgcgccagcatggtctgataaccgtgcgcgtcggtgacgctttcgattccgcgtaatacttccgcgaaaacctggttggtgagagaaggtaacaggacgccaatcgcccggctggtggcgttagagaggatatcgggcgcacgattgggaatatagcccagttcatcaagagccgcggcaatcttgccgcgtagagcgacggaaacctgctccgggttgcgtaaaaaacggctgaccgtcattttggtcacgcctacacggtcagccacatcctgaagtacgggtcttttctttttcatcgtcctgaaggtacaaaagagatagattctcttagtttaacacggacacatcagaaccttcccggggaaaacagtgcttgtttacaattattagatatacactaaatcaattgcatcgcattgtgctaacgacgcggcaaaaccccggaagcgtacatcagcacgcgaccggagcgagcgaggaagcctgcaaaaaggcaggcttcaaagatgccgttgagttttaaaccggcggcagatcgaacagtaacacttcgctgtcgctatccgcatggatggagattgcctgctcatcccagattgccagaccatcgctggtgctggctttcacgccgttaatggtgacattgcctttcaccacctggatccagacgcggcgttcagcggcaatctgatgcacgctctgctcatctttcagcaacgcccagcggtacagttccatatcctgatgcactttcaaactaccatctcgcgcatccgggctgagcaccagctgtttgccctgtacggcatcgaagcgacgctgttcataacgcggcgtaataccgttttcttcaggcatgatccagatctgatacagatgcagacgctcggtgctgcttgggttgtactcactgtgacgaatacccgtaccagcactcataatctggaactcacccgccggaacctgctctttattgcccatgctgtcctgatgctcaacagtaccttccagcacgtaggtcaaaatttccatatctttatgcgggtgagtgccgaagccctgccctgcttcaatcacgtcgtcgttaatcacgcgcagcgcggagaagcccataaagttcggatcgtaatagttggcaaaagagaaagtatgccaggagtccagccagccatgatttgcatgaccacgttcatttgctttgcgtaagtagatcatttgtattcgccccctgaatgatttcgatgggcttagtgtggacccgatctgcctgggatgatagagggtgaaaattgacccctctgttcaaaaaaattgaactattcgaggggccatcaaacttacttagcgagagttactgtggagggagaggcttgctcaaatccgcgttcaaggatttccagattggtaagaacttcagattccttgacgtaatttggcgcaccgtgggtgatggtttgatacaacgcatcataaacgcgcccgtaatcgcccatctccggcttcatctcttctctgaccgtcacgccctcgtcattgacatactccagcacaccgacgctatcatccgctgcgaatcccggttcgcccggcataatattagccttcaggctggtttcctgctggtcgataccgtatttaataaagctacctttcttaccgtgaacgataaatttcggataatcgattttcaccagatggctggttttgacgatggctttcaggtcgccataaaacagttgcgcttcaaaggtgtcgtcaggattggctttattacgcaggctgcggatgtcataagcgacgtgatccgggcgaccgaacagagaaataatctggtccatcgtatgcacaccaaggccataaaacgcgccatcctgcggcagcccaggtttggtttctgccaccgggcggtaatagtcaaaatggctttccacttcaacaatctctcccaacttgccactttcaatcgcttttttcgctgtcaggaagcaggagtcaaagcgacgattctgatacggcgtgacggtcagccctttgcttttcgccaacgcaaacagctctttcgcctgcgcaagtgtcggagtgaacggtttttcgaccagcacatttttcccggcttccagcgcgcgtttcgcgtactcgaaatggctgtccgcgtgggtgcagacaacaaccagcttaacatcgggatcgtttagtacttcgtcgagatcgctggtgaaatggatatgggaataaatgggagcctgttcttccggcttcgcatggcgacgaaaaatatgcgcgacatgccagctatccttgcggttaagtacatacggcagatggtaacgggtggtgcttttgccgaagccaataaaggcgcagttgatgaccatgatttcgtcctttttaaggtggttatttacaccttagcgcaaagcggacgtggttcctactggagtgcgcataacgaacacaagcactcccgtggataaattgagaacgaaagatcaaaaaaaaagccagcacccggctggctaagtaatactggaagcaatgtgagcaatgtcgtgctttcaggttctccgcgagggtcttcctgatcgcgagacaataataatcattctcattcgcacttgtccaacactttttgcaaaaaaatgcatttgactcgcatttgaaagtcaatgatgttgaaagggacatttaccccaaagaggacaaaggaacaaatgctcttcccacgaagagggccgctaaccttagtaccccgccgttaaatcatccacgctgcgcgggtcggatgcgccgtacaactcaccgtccggcccaaccataatgctttgtgtactgcccatcgcctctttcagcgccactttctgaccttttgcttccagcagcttgagcgtatccgggctaaaccctttttcgacacgcagctcgtccggcaaccactgatggtggaaacgcggcgcattggtcgcttcggcgacgttcaagccataatcgatgctattcaccaccatttgcagcactgtagtgatgatccggctaccgcctgggctaccggtaaccagccaggttttaccgtctttcaccacaatggtcgggctcatgctgctcagcgggcgtttgttcggcccgacggcgttggcatcaccgcccaccagcccgtaaacgttcggtacgcccggtttggcggagaaatcatccatctggttattaagcagaataccgctctcgcccgcgacaatgcccgtaccgaaggtggtgttcagcgtataggtcaccgccaccgcgttaccatctttatccaccacactgtaatgggtagtttgattactctcataaggcgcaagcttgccggggcgaatttcgctggatggcttcgctttattgatatcaatttgatcggcaatagatttggcataggctttattggtcagcgcctgccacggtactttgacaaaatccgggtcgccaagatattcgctgcggtcggcgtaggcgtatttctccgcttctgccatgatttgcatcgcatcggcgctgccaaagccgtatttcttcatatcgaagttttccagaatattgaggatttgtacgatatggatcccgccggaggatggcggtggcatggagtaaacctgatacccgcgataatcgccgcttatcggagtgcgttcgaccgctttataggctgctaaatcttctttagtgatcaagccaccgtttttctgcatctcctgggcgatctgttccgcaatcgtgcctttatagaattcgtccgggccgttttcagcaatcatctccaggctctttgccaggttcgcctgcaccagcgtgtcgccctttttcagcggctcgccctctttccagaagatagctttactgttttcgtgattcggcaacacttcgctaccgtaggttttgagatcgtcagccagcgcgtcgttaacgataaaaccatcgcgtgccagtttaaacgcgggctgcacgactttgttcagcggcatggtgccgtatttatccagcgccaggctgaaacctgctaccgtacccggtgtgccggaagccagatggctagtgagactttttttgctgtccgggttgccctgatcatcgaggaacatatcgcgggtcgctttggcgggtgccatttcgcggaaatcgatagccgtggtattgccatttttgctgcggattaacataaaaccaccaccgcccagattccctgcctgcggatgcgttaccgccagcgcgtagcccaccgccacggcggcatcaacggcattcccgccctccttgagaatatccacccccacctgagtggcagtggcgtccacagacgctaccattccctgtttcgcgcgtaccgggtggaagacatcttcctccacaccatagctgacgggcggcgcaggaggcgcggcggcggcgctaaaacaacttccactgagcagagcagcaatggccacccggcgtaaaaacgtcggttttatcatcgttattctccagagattaaggggcaaccccagctaagcctggtatataactctgaattaatcatcgttttgtcgggaagcgagtaaacttaaaggatatcttcagaggaggatacgcgatgaaacgacttctgattcttacggcactcctgccgtttgtcggctttgcacagcccattaatactctgaacaaccctaaccagccggggtatcagatacccagccagcagcggatgcaaacccagatgcagactcagcaaatccagcaaaaagggatgctgaatcagcaactgaaaacgcaaactcagttgcaacagcagcatttagaaaaccagataaacaataattctcagcgggtgttgcagagtcagccgggggagcgaaatcccgcccggcagcaaatgctgcccaacaccaacggcgggatgttaaacagcaaccgtaatccggatagtagcttgaatcagcagcatatgctgccggagaggagaaacggcgacatgctgaatcagcccagcacgccgcagcctgacattccgttgaaaactattgggccgtaattattgggccgtaaagttcggaccaatcacgtcaatcgcatcggtacagatgcaatccacaccccagcgcagcaactctgctgcgcgctggggtttattgacggtataaaccagaatccgcagtccggcgtctttcaactgcatcactcgcgctttattgagtaacttatgattgagatgaatagagacgcagcccagccgcgcggtcagttcgcgccagtcgtcgcgccactcatccagcaacaaaccgcgcggcagttccggtgccgcctgttgtgcagcttctaaagcatcaatctcaaagctactcagcagcggcggcgtcataccggcccacagctcgcgtgccgccagcgccaccattttgcccgttaatggcccggtgccggtggtgggtttgatttcgatattcgccatcatcccgtgttcgcggcaacgttccgccacctggctaagcaacggtagcggctcacctttaaacattttgctgtaccaactgcccgcatccacgcgcagtaaatcctgccagttcagttcacccgcgacgccccagccgttgctggtacgttcgagattgtcgtcatggagcaggaagatctcgccatctttgcttaacttcgcgtcaaattcgatcatcttatgaccgtattttgccccgacgtcgatactcgccagggtgttttccggggccagcttaccgccgccacgatgagcgacgatgcggggataaggccagttactcatactcgttgtcctgtttcaccatcaaaaagatgcagctgattttccgccagatgcagccacagcgtgctgcctgccgtcgggcgctcctgatgcgccagtcgcaccaccagcttctgctcgccccagcgtccgtgcgccaggttatctgcgccgaggatctccagcgtgtccatcaccatcggtacgccgccttctgcctggctgcttagcgcaatatgttccgggcgaatgccgagagtcattttacgcccggcatactgacggtagccaccgtttagcggcagctcaataccgccgtccagttcgaaatgcgtgccttcgttattcacgcggcctgtcagcaggttcatcgccggactgccgataaaactcgctacaaacaggctggcgggcttttcgtagacttcaactggtgtgccaatctgttcggcaacaccgccgttcatcaccattactcgctgggcgagcgtcatcgcttcaacctgatcgtgagtaacgtagagactagtcgttttcaggcgacggtgcaactgttgcagttcaagacgcatctgcacgcgcagcttggcatcgaggttagagagcggctcatcaaacaggaacaccgccggatcgcgcacaatcgcgcggcccatcgccacacgctggcgctgaccgccggaaagctcgcgcgggcgacgtttgagcagaccgtccagctccagaatgcgcgccgcttctttaacgcgctcggcaatttgctgcttgcccatgccgcgaattttcagcccccacgccatgttttcttcgacactcatatgcggataaagcgcgtagttctggaacaccatcgcaatcccgcgatcttttggctccatttcagtcacgcgctggtcgttgatccagatatcgccttctgtcacccgctccagcccggcaaccatgcgcagcagcgtgcttttcccgcagccagacggcccgaccatcacgataaattcgccatccgccacatcaagggtcagcggtttaatgacctgggttttaccatcccagcttttggttactgcctgtaatttcagtcctgccatcttatttctcactatcgaccaggccgcgcacgaaggcacgctgcatcactaaaacaatcaccaccggagggataagcgttaacaacatcgccaccatcacactgttccattccgtggtgccttcgcctgtagcgatcatccctttgatccctgccacggtggtgccgagatccacatcggtaataatcaacaacggccacaaatactgattccagccgtagataaaggtgatcacaaacagcgccgccagattagttttggagagcggaaaaacgatgtcgcaaaagaagcgcattgggcttgcgccgtcgatccgcgcggcttccaccagctcatccggcagcgtcataaagaactggcggaacaggaaagtagcggtcgcgctggccatcagcggcagcgttaaaccggcgtagctgtcgagcatctgcaggttggcgatgacttccaccgtcgggaagatacgtacttcaaccggcagcatcagggtgataaaaatcatccagaagaagaggttacgtagcggaaaacgaaaccagacaatggcaaatgcgctgagcatgctgacggtaattttgccgagcgtaatgctgaacgccatcacaaagctgttaagcaacatccgccagaacggcgcgctattcgtgcctaccccgttcacccagatgttgtggatgttttccagcagatgtgtgccggggatgagcgtcatcggcgcggcatagacggcctgtttatccagcgtcgccgcgacaaacgccacgtacagcgggaagaggatcaccgcgatcccgaggatcagcatggtatggctgaatatcgtcagccacggacggttctcaatcattggtaacgcaccttgctttcaacatagcggaactgcaccaccgtcagcacgatgacgaggaacatcaacaccacgctctgtgcggcagagctagccagatccagtccggtaaaaccttcgcggtagatcttataaatcagcgtcgtggtggcctgaaccggcccgccggacgtggcggcgtcgatcaccgggaaggtgtcgaagaaggcatacaccaggttcactaccagcaggaagaaactcaccggggcgataagcggcagcgcaatcttaaagaagcggcgaatcggccctgcaccgtcgatggctgcggcttcgatcaagctacggggaatggattgcagcgcggcatagaagaacaggaagttgtagctgatttgcttccatacactggcaaacaccaccagaaacattgcctgaccgctgttttgcgcgtggttccagtcgtagccgaactccgcgagaaaatgggtgatcagcccgcgaccggggttaaacaggaagatccacaatacggcggcaacggcgggagccacggcgtaaggcagcaacattaaggtttgatagaaacggctgccgcgcacgatgtactccaccagcgccgcaaagaacaggcttaccagcaaaccgctgacggtgacaaaggtgctgaattttatcgtcgtccagaaggagtcgagatagtagctgtcatggaacagcgtgacgaagttatccaggccgacaaactggctggagaaaccaaacggatcgacgctttgtaggctgtaccacaacgcttcgcccgcaggccagataaaaaagataacggtgatgatgagctgcggcgcgaccagcagataaggcagccagcggctgcggaacaccggacgggaactactcattacggttgattcctgaactgtgccggatgcgcttcgcttatccggcctacacgcgatgccaggtcagataagcgaaacgcatccgacattacactgattaagacttcgtgcttttctcaaagcggcgcagcaactgatttccacgctcaacggcggtatccagtgcctgctgtggtgtcttcttaccggtccacacgctctccagctcttcatccacaatcacgcggatctgcggcatgttgcccagacgcagccctttggtgaacggcaacggcggcttattcagcatctgacgcgtcgcggtatccgcccctgggtttttctcataaaagccctgctcacgggtcaggtcatacgctgctttggtgattggcagataaccggttttctgatgccactcggcagcgttttctggcttcgcgaggaaatcgaggaacttcgccacaccggtatacgtttctttatctttaccctgcatcacccacaggctggctccgccgataatggcgttttgtggcgcatctttcgcatcggcgtcgtaaggcatcatgcctacgccgtagttaaatttggcgtactcgcgaatgttggcaagagaaccggaagaggcggtggtcatcgcgcaatcaccgttatagaacttctcggtggattcatccttacgaccgacgtagctgaagtcgcccttcttgttcatctcctcgagcatggcgatgtgtttcacctgctccggcttattgaactccagcaccgcgtccgtgccgtcaaagccgttgtttttgctggcaaacggcagaccgttccaggcgctaaagttttccagttggatccagccctgccagccgctggcgtagccgcacttcatgccggaggctttcagtttcgcggcatagtccgccagatcctgccaggttttcggcggctgttccgggtctaatcctgctttcttgaaggcgtctttgttgtaatagagaacgggggtgctgctgttgaatggctgggagagtaagtggcccgttttgctgtcggagtagtaaccactaaccgtcggcacaaactggctctcatcgaactgaatccctgcctctttaaacacgtcatacaccggtttaatggctttgctcgccatcatggtggcggtgccaacttcataaacctgcaaaatagccggcgcgttgccggtacgaaatgcggcaatccccgcgcttaaattctgttcgtagttgcctttataggtcggtacaattttgtaatccgggttttcggcgttaaaacgttgggccagagaatccacctctttacccagttccccttccatagaatgccagaacggaatggtcgtcactgcctgtgcattccccattaacgccagtccgagcgccagtgcactagctgtataatgtaacggtttcatcgtttatctctcttgttgtaccgaatgcgcgaattcacgcgttttatgctcgcggggtaacatgacatgctcgaattacagaaaaataacttttttgttacatttgtaagatagtaaggtgtcagaaagatgacaaggcggtgacggcgtgggtgagggaaaatgggagatggggcacggataagcgggaaaatatagaaggtctgaatcaaactctacagattgctcatcgtttcatgccggatgcggcgtaaacgccttatcaggcctacaagatcgtgcaaattcaacatattgccactcacccagtaggcctgataagcgcagcgcatcaggcaattttacatttgtcacctgtctcaaaggagtcttttgactccctatcaatcaacgtgttattacccgcctaaatacgcacttctcaccgcttcattcgccagcagcgcatcaccagtatcggaaagcactacatggccgttttccagcacgtagccgcgatccgccagctttagcgcctggttggcgttctgctcgacgagaaagatagtcatcccctgctcgcgcagctgctcgatggtgtcgaaaatttgctggatgataatcggcgcaagaccgaggcttggctcatcaagcagtagcaaacgcgggttgctcatcagcgcacgaccaatcgccagcatctgctgttcaccgccggacatggtgcccgcccgctgaatacggcgctcatgcagacgtggaaacagctcatacacccactttatgcgctcctggaactggtcgcgttcagcaaaaaaaccgcccatcgccaggttctcttccaccgtcatccggctgaagacgcgacgcccttccgggacaatcgccaccgcttcgcgcatgattttcgctgtctgccagtcggtaatgtctttatcatcaaacacaattcgcccgctggtggcacgcggatcgccgcataacgtgccgagcaaggtggttttccccgccccgttcgcgccaatcagcgtgacaatctcgccctgattgatatgcaggctcacctcatgcagcgcctggattttgccgtagtgggcgctgactttgtcaaaggacaacatgactttttccatcttatgcctcacctaaataggcacggatcacgtccgggttattacggatctgctccggcgtaccgtttgccagcggcgtcccctgattgaccacgtaaattcggtcgctaattcccatcaccagcttcatatcgtgttcaatcaacaagatagtggtgttgtgatgattgcgcagttcggcaatcagctcatccagctctttcgtctctttcgggttaagacctgccgcaggttcgtcgagcattaaaatctccggctgcgtcaccatgcagcgggcaatctcaagacggcgctggtcaccataggccaggttactcgcctgacggttggcgtgttccagcaaaccaatgcgctcaagccaggtcgcggcgcggtcgagcgcttcgctctgggcgcgacggaaggatggcgttttcaacaggccagagaacagcccggttttcagttgctgatgctgcgccaccagcaggttttcaattaccgtcatttcacggaacagacgcacatgctggaaggtgcgcaccacgcccatgcgggcaatttgctgccccggtaaaccttccaggtgctgatcgcgcagtaaaatggtgccgccggtgggtttgtagaatccggtcagacagttaaaaaccgtggtttttccggcaccgttagggccgattaagctgacgatctcctgcgggtacagttcaagattgacgttgttcaccgccagcaggccgccgaagcgcatcatcaggccgttaacagataataatggctgactcatgcctgctctcctttcgctgcgccgtttttcagcttcagttgcgggcgcgtcatgggcagcaagccctgcggacgccagatcatcatcagcaccatcaaaccaccgagcattaacatgctgtattcgttgaaatcacgcatcaactcgcggctcaccaccagcaaaattgccgccagaatcaccgcaaattggctgcccataccgccgagcaccactatcgccagcacaaacgcgctttcggcaaaggtgaaggattccgggctgacaaagccctgacgcgccgcaaacagcgttccggcaaaaccggcaaacgcggcacttatggtaaaggcagtcagcttgatacgacgcgggcttaagcccaggctacggcaggcgatttcatcttcacgcaacgcttcccacgcacgccccagcggcatccgcagcaggcggttaatgacaaacaggcttagcaccaccagcagcaacgccaccaggtagaggaagatgacacgatcggagggatcgtatttcaggccaaagaaattactgaacgtgtcccagccgccttcacgagcggtacggctgaactcgagtccgaagagtgtcggtttcgggatctgactgattccgttcgggccgccggtaatttcggtgttattgagcagcaatatgcgcacaatttcgccgaaaccgagggtaacgatcgccagatagtcaccgcgcaaacgcagcaccggaaaaccgagcaggaagcccgccgccgctgccattaatccagcaatcggcaggcaggtccagaagcccaagccgtaatagtgattgagcagcgcaaaagtgtaagcgccgatggcgtaaaaaccgccgtaccccagcaccagcagaccagaaagaccaacaaccacgttcagcccgagaccgaggataatgtagatcatggtcagggtggcaatatccaccgtcccgcgactaaccataaacggccacgccaccgcaagcaccaacagcgccacgaggaacagtttctgcttcaccgtggagccatcaatggcgggcagaataaacttcggtccggaaacgcttttcaaccctttctggaaagccggtcgcaaaagctggaagaaaaagaccaccgccgtgccgataaacacccactgccaacggacatcgctagccgtgtcgaccaccagtttggtgccatccagctccagttgcacgcccataaagacgcccgccagcacaaagaacatcgcggcagagagcagcgccattgcaatatgcatcggtttcatactttctctacctccgggcgacccagaataccggtcggcatcaccagcagcaccagaatcagcagggcgaaactgaccacatctttatattccgtactcagataggcagaagagagcgcctccgcaatccccagaatcaggccgccaatcatcgctcccggaatgctgccaatcccaccgagcaccgccgcggtaaaggctttcatcccggccataaagccgatgtaggggttaatgacgccgtagaactgaccgagcagcacacccgccaccgccgccatcgccgcgccaatcacaaaggtcagcgcaatcacccggtcggtgttaatgccaagcagactcgccattttcagatcttccgcgcaggcacgacacgcgcgacccatgcgggaatagcgaatgaaaatcgtcagcgccagcatggcgaggaaggtaacaatccagatcaccgcctgcatggtggtaatagaggcagagaagttttcgctatgccccaccacccactgaccgttaaacaggctcggcagcgccacgtcgcggctaccttcggtcaggctgacgtagttttgcaggaagatggacataccgattgcagagatgagtgcaatcaggcgcttagagttacgcaccgggcggtaagccacccgttcgatactccagccgtaggcgctggcaatgacgattgcgccgacgaatcccgcagctaccagcagccagccggtatcaatgcccatcatcatcagcgcggcgatgatcataaaactgacgtagctgccaatcatataaacctcgccgtgggcgaagttgatcatgccgataatgccgtaaaccatggtgtagccgatggctatcagcgcgtaggtactgcccagcgtgacgccgttaaacatctgctgcaagaaatacaaaaactgctcagacataaggtaacctttctaaacccgcccgcattttacgggcggtgggatgatcacttggctgccgtggaactaccgtcggcgtgccactggaagacaccaaaatcaaatcccttaagatcgcctttttcatcccagttcagcggcccaatcacggtgtttgcaccgttagcttttaaatctttcaccagcgccagcggctcatcgctgccggtacgctcaagggcagtcgccagagattgcaccgccgcgtaggtgatccagacataaggcccggacggatctttcttgtctgctttcagcgcatcaacgatgccctggtttgccggatcctggtcatagcgttttggcatagtgaccaacatgccttcggcggcatcaccggcaatgttgctcaagctcgcattacccacaccttccggccccataaactgggttttcaggccaacggaacgggcctggcgcagcatctgccccatttccgggtagtaaccgccgtagtaaacgaagtcgatgttttcttttttcaggcgggcgatcagcgcggagaaatctttctccccggcggtaataccgtcgaagaagacgacgttggcgttagccgctttcagcccgtcctgcacgctacgcgccagcccttcgccatactgttgtttgtcgtgaatgatggcgatgcgctggggcttcaccgtctcaagaatgtattttgccgccgttggcccctgggaagagtccagcccggcagtacgcataatgtgttgataaccgcgttgggtcagctccgggttggtcgctcccgggctgatcatcagaataccttcgtcttcatagatatcactcgcaggctgggtagaagaagaacacagatgaccaataacgtatttaatgccgtcattaacgattttgttggcgaccgcaacggcttgtttcgggtcgcatgcgtcgtcatattccacgccaaccagtttatcgcccttaattccccctttggcattaatgtctttaattgcctgacgcgcgccgttaaattccatatcgccccactgggcaatcgggccggacatcgcgccgacaacggcgactttaatatcgtcagccatagcggtgtgactaattgccagtgcaatcatccctgcgatgatagttttcgcattccgtttcatagtcaaaaatccccattcgtgatgttgtgttgctttgtttttatgtgttaacaaatcagactgttctttttttatactgcactgtttttgcctgtctgattaaggggttagcgcagtattttgtgataatagcgattaaaatccctatttttcagtcgattaagaacagataatattctgaatttattgatagataaacagaaaaaagtgcctttgtcagcataaaataacggcacaaagggcggaataattcactatcattcaggggattatgctggacatttttcattctctaatgttttaattttgtaattattgctgttaaaaaattaatcacctgccaaaagaaataaaaaagagaaagcctccgattaaattatttcgctacactggttccacttttgtgatttacacgggttacccatgaagctgaccatcattcgattagaaaaatttagcgaccaagaccggattgacctgcaaaagatctggccggagtattccccttccagcttacaggttgacgataaccaccgtatctacgccgcgcgttttaacgagcgcctgctcgctgccgtgcgggtaaccttaagcggcaccgagggagcactggattccctgcgcgtgcgggaagtcacccgccgtcgcggtgtggggcaatatctgctggaagaggttttgcgtaacaatcctggcgttagttgctggtggatggcggatgcaggcgtggaagatcgcggtgtgatgacggcgtttatgcaggcgctggggtttacggcacaacagggcggctgggagaagtgttaatcgtcaagtttgatttcaaaagtgatattgcctgatgcgctacgcttatcaggcctacaatgtgtgttgcaatttactgatttctttggatcttgtaggccggataaggcgtttacgccgcatccggcatgaagcaacgtactcgatattagcaatttggcggcaacccaaagttgccgattaatgattacttcgcatcggtcgccgtgccgttggcgtgccagtcaaatacgccgaactcaaagcctttcagatcgcctttctcatcccaggtcagcggtcccattacggtatccacggagttcgctttcaggtatttggcgatttcagccggatcgtcagactgattcaggcccgcctgcaaagattgcagcgcggcgtaggtggtccaaacgaatgcgccacttgggtcctgttttttcgctttgatcgcgtcaacaatgggtttgttcgccggaacctgatcgtagttcttcggcttggtcaccagcagcccttccgcactttcgcccgcaatgttagacaggctaacgttagccacaccttccggccccataaactgagttttcagccctgccgcgcgtgcctgacgcaggatttgccccatttccgggtgataaccgccgtagtaaacgaagtcgatattctcttttttcagacgcgccaccagcgtactgaaatctttttccccggcggtgatgccatcaaagaacaccacgtttgcattgcctttcttcaggccgtcctgcaccgctcgcgccagaccttcgccgtattgctgtttgtcgtgaacgatagcaatacgctgcggtttcactttctcaagaatatatttcgccgccgtcggcccctggtcggagtccaggccggtggtgcgcaggatcagctgatagccacgggcggtcagctccggcgcggttgccgctggggtgatcattaaaatgccttcgtcttcgtagatgtcagacgcaggctgcgtactactagaacagaggtgaccaatcacatatttaatgccgtcgttaacgactttgttcgccaccgcaaccgcctgtttcgggtcacaggcatcgtcatattttacgatttgcagtttgttgcctttaatgccgcctttagcgttgatatccgcaaccgcctgctctgcgccggtaaactcctggtcaccgtactgcgcaaccggaccggacattgcgcccacgaccgcgactttaatatcttctgccagagccatattgctgaatgccagcgcgatacatcctgccagtaacgctttaccctttatgttcatcctgagaatccccattcttctggttattacgtgtgttgtgatgttgtttttcagcactttatttcgttttatgcatgactacccgtgctttagcagcatactctgctaaaacatacccgatttttatgatattggaatagctattttgacagtttattaacaatctgcgtggggattggcgttttgccggaggggaaattgattattacagaggcccaaaaaacaaaaaccccggactctcatccagggttctctgcttaatagcggaaattacgcttcaatggcagcacgcaattttttcatcgcgttcttttccagctggcgtacacgctcagcggaaacgccgtaacggtcagccagttcctgcaacgtggacttgttgtcttcgtccagccagcgcgcacggatgatgtcctggctgcgttcgtccagaccctgcatcgcgtcggtcagacggtttgccgcctgctcttcccagttatcatcttcaatgccgtcggcaaagttagaacttttatcctgcagatagagcaccggagccatcggctggctgtcggaatcgtcgtcggaagacaggtcaaaggtcatgtcctgtgccgccatacgactttccatctcacgtacgtctttgctggttacgcccagttcacgggccaccatttcgacttcatcctggttaaaccagcccagacgctgcttggttttacgcaggttgaagaacagtttgcgctgcgctttggtggtcgcaactttgacgatacgccagttacgcagaacgtattcgtggatctctgctttgatccagtgaacggcgaaggagaccaggcgcacacccacttccgggttgaaacggcgcactgctttcatcaggccgatgttaccttcctgaatcaaatccgcctgtggcaggccatagcccgcataattacgagcaatatgaacaacaaaccgcaggtgagacaggatcagcgttttagctgcttccagatcgccatggtaatgcagcttttcagccagcgcccgctcctcgtcagcgctcaacatcggccacgcgttagctgcccggatgtaggaatccaggttgccaactggggctaaagctaaactttgcattttgtcagtcattcaaatcctctcaatcgatatcttctggcgcttcagtggtagcaacaactgtgccagagcttaagagcaacgaggttatcattcactgttttatcagaccgtgattttatccacaagttcaatgcaagcttgtgaataaattacgcacaaaatgtgacatagagatgaaataccgggaagagacaacggggtctctttccctgctacggaacccattgcagggaaagagtataacacgcttttattattcaggcgtaaagtggcgtaaatgttgtaccgtggcaagccacgctgccacccagccaatcatgctgcataccagcagcaatagcaggcattcatcgaaacttaagccattgatatcaaacttcgttccgaaaacctgtgccacttccgcaaccgcgctactcaatcgcagcaccagaatttcactcaaaattaaactcaacaatgcgccagaaaatcccagcagtgcgccaccatacaggaacgggcgcaggatgaatccatctgtcgcaccaatcagtttctgtacgttaatggagtcacggcgagcaaagatactcagacgcacactgttaccgatgacgaggaacacggccgccaccatcaacacgccgatcatcgcgctaacgcgcccgaccagcccggtcaacgccgccagacgggcaaaccagctgtcatccatccgcacttcgtcaatgccgttaatctgcgtgatacgatcacgcagcgtattcagactttccgtcccctggaaatcgagtttcgggatcaccaccgccactgccggaagcgggttttcttccagcatatccagcgcaccaccaaaaccagaccagttacggaactcacccagtgcgtcttcacgagaaagatagttcactttctccacgccttgctcggcctgcaactgtgccaccacgcccgcagcagcgtcatcgtccagcgttttttgcagataaacagtgatttgcggactcggataatactgcgtcgccgcctggttaacgtttttgtacaccatataacagacgctgggcagcgtcagagaaatggcgataaccatcaccgttaaaaacgtggcgaacggtttgcttttcagatcctgcaatgcgccgtggaaggcatagcgcacctgttcgttgaaaacgttggttttgcgatttaccggttttgggctggatttcgcgcgttttggtgcgttacgaccgccgtcgccactgccgccgacgcttttacggaagcgatcaagacgcccgccaaactgccgaatatgattgattgcatcgcgcttattcatggcccacgcctccatgcaagtgaccatcgctcagggtgagcatgcgataggaacgccggctgatcaggttgatgtcgtgcgttgccatcaatacggttaccccaacgcggttaaactcttcaaacagacgtaaaatgccttcgctcagcgcgtcgtccaggttaccagtcggttcgtccgccagcagtaccgcgggcttgttcaccaccgcgcgggcaatgccaacacgctgttgttcaccgccgctaagctgaatagggaagttcttcgctttgtccagtagcccgactttatccagcgccgcgctcacccggcgacgaatatcgtcaccgctggcaccggcgataatcagcgggatcgccacgttatcgtagacagtacggtccatcagtagatggtgatcctggaaaatcatgccaatctggcggcgcagaaacggaacttcacggtttttcagacgcgtgatgtcatggccgctaaaccagattttcccggcgctgggccgctcaatcccacagatcagcttcaggagggtacttttccctgcgccggaatgaccggtcagaaacgccatctcacccggctgcatatggaacgtaacgccctgcagcgcctgtctcccaccgagataagccttgctgacatgttcaaagcgaatcattgttaatcctctcgggcaaaaagtgcctctataaagtcgtccgccttaaacggacgcaaatcctcaatacgttcgccgacaccaatgtagcggatagggataccaaactggtcagccacgctgaaaattaccccgcctttcgccgtgccgtccagtttcgttagcgtgatgccggttaagccaacggcttcatggaacagtttggcctggcttaccgcgttctgcccggtgctggcatcaatagtcagcataacttcatgcggcgcttcaacgtcgagtttcttcatcacgcggacgattttcttcaactcttccatcaggtggcttttgttctgcaggcgtccggctgtatcggcaatcaggacgtcgatattacgcgctttagctgcctgaatggcgtcgaagataacagaggcggaatccgccccggtatgctgggcaatcaccggaatattgttgcgctgaccccagacctgaagctgttcaaccgcagctgcacggaaagtatcacccgccgccagcatcacgcttttaccctgctgctcaaactgacgcgccagcttaccaatcgtcgtggttttacccacaccgttgacgcccaccatcaggatcacaaacggcgctttgccttcaacattcagcggctcatcgactttcgccagaatctcgcccatctcttctttcagcaggccatagagcgcctcggcgtcacgaagctgcttgcgggatgcgccttccgtcagattggtgataattttacgtgtggtttccacacccacatcggcgatcaaaagctgctcttccagctcctcaaacagatcatcgtcgatttttttaccgcggaacaggctgataaatccggaaccgagattttctttggtttttaacaggctgcgtttcaggcgcgcgaaaaaaccttctttggtcggtttttcctgctcctgagcgatttcttccaccggctgctcttcttctgccggaggaaccaccatcaccgcctcttctgccgcttcggcagccagcgccgtttccagctcttcgtcggtaatttcttctttagccgcttcttcttccgccgcttcgacaatctctacggtttccgcttcagcctgccactcttctgggctaaccgcttcggcgttgacgtcttccggcaacggcagctcttcacgttcgatagccactggctccggcgtttcttctacgaccggttccggctgtgcaacgacttccgcttcaggctgcgctttttcactttcagcaacctgttcagtgacttccacaacgtcggcagcaaaagtttccgcctcggcttcagtatgcgcttgcggctgctcttcaacggcttgttcagaggccttcacaggctcttgcgcctgaacgatttcttctacaaccggttgttcattctgaacttctgtctctttttccggggtctgctctttttgaccaaagcccagccaggaaaaaaagccacgttttttttctttcgccatttgcgactacactcctcgctgttgcttcatggcacagcgttaacgctatgtacatagcagctaaaaaaatgatgaaatagtctatcacttaacttaattcacatcaccgcctgcaagtatgtgttatctggcggattgagcaatttatcatgaaaaaaccgaatcattccggcagcggccaaatccgcattattggcgggcagtggcgaggccgtaaactcccggttcctgatagcccaggtctgcgccccaccaccgaccgcgtacgcgaaacgttgtttaactggctggctccggtcattgttgacgcccaatgtctggattgcttcgccgggagcggcgcgctggggctggaagcgttaagccgctacgctgcgggggcaacgttgattgagatggatcgcgcggtttctcagcagttaattaagaatctggcgacactaaaagcaggcaatgcacgcgtggtgaacagcaacgcgatgagtttcctggcgcaaaaaggtacaccgcataatatcgtgtttgtcgatccaccgttccgccgtggcttgttagaagagacgataaatttactggaagataacggctggctggctgacgaagccctgatttatgtcgaaagcgaagtcgaaaacggtctgcccactgttccagcaaactggagtttacatcgggaaaaagtggcgggtcaggtggcttatcggctgtatcaacgcgaagcacaaggagaaagtgatgctgattaatattggtcgtttgttaatgctctgcgtttggggatttttaatcctcaacctggtgcatcccttcccacgcccgctgaatatcttcgttaacgtggcgctgatttttaccgtgctgatgcatggtatgcagctggcgctattgaaatccactttaccgaaagatggcccgcagatgaccaccgccgaaaaggtacggattttccttttcggcgtgtttgaactgctggcctggcagaagaaatttaaagttaaaaaataaccttattgttcgcctacaaagctgacaaagcgcgttcctttatagctcagcgtacctttatcgcccactgtcagggcgtggtactgctgggcgtcgaggcgaaacgtctgctccattcctccgctttgcggtttgaagcttgcctcatagcgtatactggtgcctgccggagtcacttcctgctggcggctacggcgatcgttaatcggtttttcccgcttgttgctcaccaccaccagcttttgctggagcggagccatatcattatcagctttttcccgtcgctgttgcataaaacgaaagcttgcggcgacgacaattaagccaatgataacaataaagaaaagaggtggtttgctcatctttatccctcatcggaaaatgcggaaataagcataccctgccagttatggtgttgtcatccgtccaccctcgccactaaactggaagcaagaccgtaggcattccgcttacgaaaaaataacgaattcaaggaactaagatgctttggagctttatcgctgtctgtctttccgcatggctatctgtggatgcaagctatcgtgggccaacctggcaacgctgggtgtttaaaccgttaacccttcttctcctgctgttactggcctggcaagcgccgatgttcgacgccattagctatctggtgctggcagggctgtgcgccagtctgctgggcgatgcgctaaccctgttgccacgtcaacgtctgatgtacgccatcggcgcgtttttcctcagccacctgctgtacaccatctatttcgccagtcagatgacgctctctttcttctggcctctaccactggtgctgctggttctgggtgcgctgttactggcgattatctggacgcgcctggaagagtaccgttggcctatctgcacgtttatcggcatgacgctggtgatggtgtggctggcaggtgaactgtggttcttccgtccgaccgctccggcgctctctgcgtttgttggcgctagcttgctgtttatcagtaactttgtctggctggggagccactatcgccgacgcttccgtgcggataacgcgattgctgcggcctgctactttgccggtcacttcctgatcgtccgcagcctgtatctctgataaaacttgactctggagtcgactccagagtgtatccttcggttaatgagaaaaaacttaaccggaggatgccatgagcactcctgacaatcacggcaagaaagcccctcaatttgctgcgttcaaaccgctaaccacggtacagaacgccaacgactgttgctgcgacggcgcatgttccagcacgccaactctctctgaaaacgtctccggcacccgctatagctggaaagtcagcggcatggactgcgccgcctgtgcgcgcaaggtagaaaatgccgtgcgccagcttgcaggcgtgaatcaggtgcaggtgttgttcgccaccgaaaaactggtggtcgatgccgacaatgacattcgtgcacaagttgaatctgcgctgcaaaaagcaggctattccctgcgcgatgaacaggccgccgaagaaccgcaagcaagtcgcctgaaagagaatctgccgctgattacgctaatcgtgatgatggcaatcagctggggtctggagcagttcaatcatccgttcgggcaactggcgtttatcgcgaccacgctggttgggctgtacccgattgctcgtcaggcattacggttgatcaaatccggcagctacttcgccattgaaaccttaatgagcgtagccgctattggtgcactgtttattggcgcaacggctgaagctgcgatggtgttgctgctgtttttgattggtgaacgactggaaggctgggccgccagccgcgcgcgtcagggcgttagcgcgttaatggcgctgaaaccagaaaccgccacgcgcctgcgtaagggtgagcgggaagaggtggcgattaacagcctgcgccctggcgatgtgattgaagtcgccgcaggtgggcgtttgcctgccgacggtaaactgctcagtccgtttgccagttttgatgaaagcgccctgaccggcgaatccattccggtggagcgcgcaacgggcgataaagtccctgctggtgccaccagcgtagaccgtctggtgacgttggaagtgctgagtgaaccgggagccagcgccattgaccggattctgaaactgatcgaagaagccgaagagcgtcgcgctcccattgagcggtttatcgaccgtttcagccgtatctatacgcccgcgattatggccgtcgctctgctggtgacgctggtgccaccgctgctgtttgccgccagctggcaggagtggatttataaagggctgacgctgctgctgattggctgcccgtgtgcgttagttatcagtacgcctgcggcgattacctccgggctggcggcggcagcgcgtcgtggggcgttgattaaaggcggagcggcgctggaacagctgggtcgtgttactcaggtggcgtttgataaaaccggtacgctgaccgtcggtaaaccgcgcgttaccgcgattcatccggcaacgggtattagtgaatctgaactgctgacactggcggcggcggtcgagcaaggcgcgacgcatccactggcgcaagccatcgtacgcgaagcacaggttgctgaactcgccattcccaccgccgaaagtcagcgggcgctggtcgggtctggcattgaagcgcaggttaacggtgagcgcgtattgatttgcgctgccgggaaacatcccgctgatgcatttactggtttaattaacgaactggaaagcgccgggcaaacggtagtgctggtagtacgtaacgatgacgtgcttggtgtcattgcgttacaggataccctgcgcgccgatgctgcaactgccatcagtgaactgaacgcgctgggcgtcaaaggggtgatcctcaccggcgataatccacgcgcagcggcggcaattgccggggagctggggctggagtttaaagcgggcctgttgccggaagataaagtcaaagcggtgaccgagctgaatcaacatgcgccgctggcgatggtcggtgacggtattaacgacgcgccagcgatgaaagctgccgccatcgggattgcaatgggtagcggcacagacgtggcgctggaaaccgccgacgcagcattaacccataaccacctgcgcggcctggtgcaaatgattgaactggcacgcgccactcacgccaatatccgccagaacatcactattgcgctggggctgaaagggatcttcctcgtcaccacgctgttagggatgaccgggttgtggctggcagtgctggcagatacgggggcgacggtgctggtgacagcgaatgcgttaagattgttgcgcaggagataaggcaaaccgatcgcaacattgagcgcgatcggtcccctcgcccctctggggagagggttagggtgaggggaaaaggcggcatcgaagccaatcagcccctatcaaccgcctttacgaatcaaataacgataaggcagtccatccgtctctttagcaaccagttcgtgttccataaaggtacaaaacccaggaatatcgcgggtagtggccggatcgtcggcgataatcagcaacgtttcgccaggctgcatattgcgcacggttttgcgcaccatcatcaccggttccgggcagcgcaggccaagcgcgtcgagtgtgtggtcagggctggaaaagagatcggtcattttcttctcatcacttaaaaaaacggcgctagtttacgccctgtgagtccgtaagcaaactaggttaacgattgcgtgaaaattaaccattgcattgtcaacgtaaagcagtatcatgcggcggctcgaaaaaagggtaagcacgttattatgttaaggtaacagacgtgtcgtacgtattgggttccctcaccccaatggttaatcaaaaaggtacaatatgaacgttttcagccaaactcaacgctataaggcgttgttctggttaagcttatttcatctgctggtgatcacctccagtaactatctggttcagcttcccgtctccattttgggtttccataccacctggggcgcgtttagctttccgtttatttttcttgctaccgacctgaccgtgcgtatttttggcgcaccgctggcccgacgcattatcttcgcggtaatgatccctgcgttattaatctcctacgtcatcagcagcctattctatatgggttcctggcagggattcggcgcactcgcccacttcaacctgtttgtcgcccgtatcgccaccgccagtttcatggcctacgcgctggggcaaatcctcgacgtgcacgtttttaaccgcctgcgtcagagtcgccgctggtggctggcaccgacagcgtccacactgttcggtaacgtcagcgacacgctggcctttttcttcattgccttctggcgtagcccggatgcctttatggctgaacactggatggaaatcgcgctggtcgattactgtttcaaagtgttaatcagtatcgttttcttcctgccaatgtatggcgtattactcaatatgctgttgaaaagactggcagataaatccgaaatcaacgctttgcaggcgagttaaaggttcgttatcagagttgtgataagatggatgaatgagccgttatggccgtttatcgaaaggaagaagtcaatgcgcaatctggttaaatatgtcggaattggcctgctggttatggggcttgcggcctgtgatgataaagacactaacgctacggcgcagggtagcgtcgcggaaagtaacgctaccgggaatcccgtcaacctgcttgatggcaagttaagtttcagcctgccagcggatatgaccgaccagagcggtaagctgggaacgcaggccaataacatgcatgtctggtccgacgccaccgggcagaaagcagtcatcgtcatcatgggcgatgatccgaaagaagatctggcggtgctggcgaagcgtctggaagatcagcaacgtagccgcgatccgcagctgcaagtggtaaccaataaagccattgagctgaaaggtcacaaaatgcagcagttagacagtattatctccgcgaaaggccagacggcgtactcttccgttattctgggtaacgtgggtaatcaactgctgaccatgcaaattacgctgcccgctgacgatcagcaaaaagcgcagaccaccgcagaaaacatcattaatacgctggttattcagtaagttttaagaactactggcggcctcagggacgtgttccggaggccgtttttttaatcgccacgtcagtaataacgcgattgcgaccagtcccgccgccgccagataaatcaccggtacgcccgcccagctcatcaccagcccagccagtggtccagtcacgccaaggcttaaatccataaatacggtgtaagttgccagcgccgccccctgattttgctgcggaaccgcttttaccgccactacacccaatgccgggaacaccaggctaaacccggcccccgccagtaagacgccgattttcgccatccacggcatagtcgccacgccaaccagtagcaggccgattatctcaacgctaaagcaaatcatcgctacgtttaagccaccgatacggttaatgccgttagggaataacaaacgcgtaccgacaaacgcacagctaaacagcgtcagcgcgaaagccgcaccgtcccaacctttagcgtcataaaacagcgtgataaaggtggcgatgacgccaaatccggcggaagccagtgccagcgccataccgtacagccagacgcgcccaagcaccgcgcgaaacggcagcggtttgcctttactggcttttaccgtcggacgcgggatcgccaacaaaatggccaccagcgccacgcccataatgattaacgctaacgcctgcaagccgccccagtgataaaacacgacgcctaacggcgcacccatcgccatcgccccgtaagtgacaatgccgttccagctaatcacccgcccgatatgcaggctgccaaccacgccaacgccccatagggtgcttcccgttccggcaaaactttgcccaatcccaaggatgacgcgccccaggcaaagtaataacaggctgatgacaggcagactggcggttaatcctgccgtcagataccccagaccgctcaaaaagcagccgcataaaccgaagacgacaatctttttgggtcccaggctatcggcgtaacgtccggcatgagggcggctcagcaaggtggcgaaatattgcaggctgataaccaatcctgcccagaaggcgctaaagcccatcacatcatggacatagcccggtaatacagcgagcggcaacccgatggtgaggtagctggcgaagttaaacatgactatagagacaatgcgcaaattcaggcgcaatccgtttagcgcgggttcggctacgggttcgggcatgaggatcaccacatttttacaacagtgtttcatttttaccacgtgctgacgtgaaaatcagcagtaagaatcagaatattgctggcgtgactcccgctacacttaatacaaaaagtcacaaggaagccccaatggaaacccctcaacccgataaaacgggcatgcacattctgctcaagctggccagcctggtagtgatcctcgcgggcattcacgcagcggcagatatcattgtgcagctgttactggcgctgttttttgccatcgtcctcaacccgctcgtcacctggtttattcgtcggggagtacaacgccccgttgccattacgattgtagtggtggtgatgctgatcgcactaaccgcgctggtcggcgtactggcggcaagctttaacgaatttatctctatgctgccgaagtttaataaggagctgacgcgcaaactttttaaattgcaggagatgttgccttttcttaatttgcatatgagcccggagcgaatgctgcagcggatggacagcgaaaaagtggttaccttcaccacagcgctaatgaccgggctttccggggcaatggcgagcgtgcttttgctggtgatgaccgtagtttttatgctgtttgaagtgcgccacgtcccttacaaaatgcgttttgcgctgaataatccacagattcacatcgcgggattacaccgcgcacttaaaggcgttagccactatcttgcattgaagacgctactcagtttatggacaggtgtcatcgtctggctggggctggagctgatgggggtgcagtttgcgctgatgtgggcagtactggcgtttttgctcaactacgtgcccaatatcggcgcggtaatttccgccgtaccgccaatgattcaggtgctgctgtttaatggtgtttacgaatgtattctggtcggcgcattgtttttagtggtccatatggtcatcggcaatattttagaaccacggatgatgggccatcgcctggggatgtccaccatggtggtatttcttagtttgttaatttggggatggctgctcggcccggtagggatgctacttagcgtgccattaaccagcgtgtgtaaaatctggatggaaaccaccaaaggcggtagcaaactggcgattttactggggccgggcagaccgaaaagtcggttaccgggatgaggcgacaagtgatacgatacgcactttcattttccattaaacgttggccctgatatgtatcggatagttctggggaaagttagcaccttaagcgcagctccactgccaccgggtttacgcgagcaagcaccgcaaggtccacgacgcgaacgctggctggcggggcgtgcattgcttagccacacgctttccccgctaccggagatcatctatggcgaacaaggcaaacctgcatttgcgccggaaatgccgctatggttcaacttaagccatagcggtgacgatatcgccctgctgttgagtgatgaaggcgaagtcggctgcgatatcgaagtgattcgcccgcgcgccaactggcgctggctggcgaacgccgtattcagcctcggggaacacgctgagatggacgccgtgcatcctgatcagcaactggaaatgttctggcgcatctggacgcgcaaagaagccatcgttaaacagcgtggcggcagcgcctggcaaatcgtcagcgtagacagcacctatcactccagcctgagtgtcagccattgtcagcttgaaaatttaagccttgcgatctgcacccctactccctttacgctcaccgccgacagtgtgcaatggatcgatagtgttaactgatccgcccacccgactgcccatctattgatccagaacaggtaatcagtatgacgaatacttaaaatcgtcatacttatttccgccatctattttaatccattggggttaccatgctctccacactccgccgcactctatttgcgctgctggcttgtgcgtcttttatcgtccatgccgctgcaccagatgaaatcaccaccgcctggccggtgaatgtcgggccactaaacccgcacctttacacgcctaaccagatgttcgcccagagcatggtttatgaaccattggtgaaatatcaggcagacggtagcgtgatcccgtggctggcaaaaagctggactcatagtgaagatggtaaaacctggaccttcaccctgcgtgatgacgtgaaattctccaacggtgaaccgctcgatgccgaggcggcggcagaaaacttccgcgcagtgctcgataaccgtcaacgtcacgcctggctggagctggcaaaccagattgttgatgttaaagcactcagtaaaacagagctgcaaattaccctgaaaagcgcctactatcctttcctgcaagaactggccctgccccgtcctttccgttttatcgctcccagccagtttaaaaaccatgaaaccatgaacggaattaaagcgccgattggcaccggaccgtggattttgcaggaaagcaaactgaatcagtacgatgtcttcgtccgtaacgaaaactactggggcgaaaagccagcgattaaaaagatcacctttaacgtcatcccggacccgactacccgcgcggtggcgtttgaaactggcgatatcgacctgctgtacggaaacgaagggttattaccgctcgataccttcgcccgctttagccagaatccggcttaccacacccaactgagtcagccgatcgaaaccgtgatgctggcgctcaataccgccaaagcccccaccaacgagctggcagtacgtgaagctcttaattacgcggtaaacaaaaaaagcctgattgataacgcgttgtatggcacccagcaggtcgccgacaccctgtttgccccttctgtgccctacgccaacctcggcctgaaaccgagccagtacgatccgcaaaaagcgaaagcgttgctggaaaaagccggttggacgctgcctgcgggcaaagacatccgcgagaaaaatggtcagccgctgcgcattgaacttagcttcatcggcaccgatgcgttaagcaaaagcatggcggaaatcattcaggctgatatgcgccagattggcgcagatgtcagcctgattggcgaagaagagagcagtatctatgctcgtcagcgcgacggtcgttttggcatgattttccaccgcacctggggcgcgccatatgatccacacgccttcctcagtagtatgcgcgtaccgagtcacgctgacttccaggcacagcaaggattagccgacaaaccgctgattgataaagagatcggcgaagtgctggcgacccatgacgaaacgcaacgtcaggcgctgtatcgcgacattctgacccgtctgcatgacgaggcggtttatctgcctatcagttacatcagtatgatggtggtaagtaaaccggagctgggtaacatcccctacgcgccgatcgccaccgaaattccgttcgaacagattaaaccggtgaaaccttaatgttgcgttacgtattacgccgctttctgctgctgatcccgatggtgctcgccgccagcgtgatcatttttctgatgctgcgcctcggtaccggcgacccggcgctcgattatttgcgtctgtctaacctgccgccgacgccggagatgctggcctctacccgcaccatgctgggactggatcagccgctgtacgtccagtacggcacctggttgtggaaggcgctgcatcttgactttggtatcagtttcgccagccaacgcccggtactggacgatatgctgaacttcctgcccgccacgctggaacttgcaggtgcggcgctggtattaattctgctcacttccgtaccgctcggtatctgggcggcgcgccatcgcgaccgtctgccggatttcgccgtacgtttcatcgcgtttcttggcgtgagcatgcctaacttctggctggcgtttttactggtgatggcgtttagcgtgtatctgcaatggctacccgcgatgggttacggcggctggcagcacatcattttgcctgcggtttccattgcctttatgagcctggcgattaacgcgcgtttactgcgcgccagtatgctggacgtcgccggtcagcgtcacgtcacctgggcgcgtctgcgcggcctgaacgacaaacagaccgaacgtcgccacatcctgcgcaatgccagcctgccgatgatcaccgccgtggggatgcatatcggcgaactgattggcgggacgatgattatcgaaaacatctttgcctggccgggcgtcgggcgctatgcggtgagcgcgatttttaaccgtgactatccggtgatccagtgctttacgctgatgatggtggtggtttttgtggtctgtaatttgattgtcgatttgctcaacgccgcgctggacccgcgcattcgtcgtcatgaaggagcgcacgcgtgaactttttcctctcttcccgctggagcgtacgcctggcgctgatcattatcgccctgctggcgctgattgcgctcaccagccagtggtggctgccgtatgacccacaggcgattgatttgccgagccgcctgcttagcccggatgcgcagcactggctgggcaccgatcacttaggtcgcgatattttcagccggctgatggcagcgacccgcgtgagcctcggtagcgtaatggcctgcctgctgctggtgctgacattagggctggttattggcggcagcgccgggttgattggcgggcgcgttgatcaggccaccatgcgcgtcgccgatatgtttatgaccttcccgaccagcattctgagcttctttatggttggcgtgctcggcaccgggctgaccaacgtaattatcgccatcgccctgagccactgggcgtggtatgcacgcatggtgcgcagcctggtgattagtctacgccaacgcgagtttgtgctggcgagtcggctttccggtgcgggccatgtgcgggtgtttgtcgatcatctggcaggcgcggtgatccctagcctgctggtgctggcaacgctggatatcggccatatgatgctgcacgtcgcggggatgtctttccttggcctcggtgtgaccgcgccgaccgccgaatggggcgtgatgattaacgacgcgcgccagtatatctggacccagccgctgcaaatgttctggccggggctggcgctgtttatcagcgtgatggcctttaacctggtgggtgacgcactgcgcgatcatctggaccctcatctggtgacggagcacgcacactaatgccgcaacagattgaactacgtaatatcgcgctacaggccgcgcagccgctggtacacggtgtaagcttaaccctgcaacgcgggcgcgtgctggcgttagtcggcggtagcggcagcgggaaaagtttaacctgcgccgcaacgctgggcattttgcccgctggcgttcgccagacggcgggggaaattttagccgatggcaaaccggttagcccttgcgccctgcgcggcatcaaaattgccaccatcatgcagaacccgcgcagcgcctttaatccactgcacaccatgcacacccacgcgcgggaaacctgcctggcgttagggaaacccgccgatgacgctacgcttaccgctgccatagaagcggtggggctggaaaacgccgcgcgcgtgctgaagctgtacccgttcgagatgagcggcggcatgttgcagcgcatgatgattgcgatggcggtgctgtgtgaaagtccgtttatcatcgccgatgaaccgaccaccgaccttgacgtggtagcacaggcgcgcatcctcgatctgctggaaagcattatgcaaaaacaagcgccgggaatgctgctggtgacccatgatatgggcgttgtggcgcgtctggcggatgacgtggcggtgatgtctgacggtaagattgtcgaacagggcgatgtagaaacgctgtttaacgcccccaaacatacagtgacgcgcagcctggtttccgctcatctcgccctctacggtatggagctggcaagttgacctaatacggtatggagctggcatcatgactttacttaacatctccggcctttcccatcactatgcgcacggtggatttaacggaaaacatcaacatcaggcggtgctgaataacgtttccctgaccctgaaaagcggcgaaaccgtcgccctgctggggcgcagcggctgcgggaaaagtaccctcgcgcggttgctggtgggtttagaaagccccgcgcaggggaatattagctggcgtggcgaaccgctggcgaaactcaatcgcgcccagcgtaaagcgttccgccgcgatattcagatggtatttcaggactccatcagcgccgtgaatccgcgcaaaaccgtgcgcgagatcctgcgtgaaccgatgcgccacctgctaagtctgaaaaaatccgaacaactggcgcgcgccagcgaaatgctgaaggcggtcgatctcgatgacagcgttctcgacaaacgcccaccgcagttaagcggcggccagctccagcgcgtctgcctggctcgcgcgctggcggtcgaaccgaaactactgattctggatgaagccgtttctaaccttgatctcgtgttacaggcgggtgtcattcgcctgctgaaaaagctacaacaacagtttggcaccgcctgcctgttcatcacccacgacttacgcctggtagaacgcttttgccagcgggtaatggttatggacaacggacaaatcgtcgaaacccaggtggtgggagagaaattaaccttttcctctgacgccggacgtgtgctacaaaacgcggtattacccgcattccccgtgcgccgtcgcaccacagaaaaggtttaacgcaaatgcaacgagtcaccatcacgcttgatgacgatttactggagacgctggacagcctgagccagcgtcgtggttataacaaccgttccgaagctatccgcgacattctgcgtagcgccctggcgcaagaggccacccagcagcacggcacgcaaggtttcgcggtgctgagctatgtgtatgaacacgaaaaacgcgacttagccagccgcattgtctccacccagcatcatcaccacgacctctccgtcgccacgctgcatgtgcacatcaaccacgacgactgtctggaaatcgccgtgttgaaaggtgacatgggtgacgtgcagcattttgccgatgacgttatcgcccagcgcggcgtgcggcacgggcatttgcagtgcttgccgaaggaagattgagttacgccattgtcccaatcgtcttcctgaatcgcagcagcgcaatggtgaaaaatgcgccgccaattgccatcagcgtcagaaactgcggccagacgatttcgaatccggcaccccggtagaggatggcctgcgcgaggctaacaaagtgtgtcgtcggcatggtcagcataatgtcctgcaccatctgcggcatactttcgcgcggcgtggaaccaccggaaagcatttgcagcggcagcagcaccagaatcaccagcagccccagttgcggcatactacgcgctatcgtccccataaaaatgccgatactcgtggtggcaaacagactgagcgccacgcccagcataaacagcgggatgctgccttcaatcggtacgcccagtacacctttcaccatcagcaccaggcttaatccgcttaccaccagcaccaccagccccatgctccagatcttcgccatcatgatctcaaacggcgttatcggcatcaccagtaagtgttccaccgtgccgtgttcacgctcgcggatcagcgcgcttccggtcaatacaatcgccagcatggtaatgttgttgatgatcgccatcaccccgccaaaccacgcgggatcgaggttcgggttaaagcgcatccgggtttccaggcttaccaacggttcgctgttatcacggtagcgcgcgacaaagctgttcacttcaccgttgataatattctggatatacccattgccggtaaatgcctggctcatgcgcgtggcatcgacgttcacctgaatatccggctggcgtccggcgaggacatcacgctgaaaattaggcggaatatttatcgcgaaggtatagcgtccggcgtccagtccggcatccatctcatcggcggtgatcatctccggtggcaaaaaccacggacgatagaagctgttaacgatccggttgcttaactggctttgatccatatcggcaatggcgatcggcgcgaggttcaagcttcctggcgtaacggtcgcactgctatacacgctcaccgtaaagctgaagacaatcagcgtcagcatcgctttatcaccgagcagactgcgcaactctttgatacccagattaaaaatattgcgtaaatggcgcatcatccctcctgttttttcagcagcaggatacttaagcccatcaccagcgggatggctatcagtaacgggataaaaagttgccacaaatcagtcagatccagcgctttgctgaacgtcccgcgggcgatagtcagaaaatgactggtcgggtaaacctcgccgatccaacgtccaggcccttccaggctagctaccggatcgatcatcccggaaaactgtgtcgccgggatcaacgtgataatcgccgttccgaaaatggcggcaatctggcttttcataaaggtggagatcagcagccccattccggtggcaatgatgatatacagcagcgccgccagggtgagcgtcaggaaactgcctttatgcggtacgccaaacacaaacacgctcaggccgcagagcaggaaaaagttcagcatccccagcgcgatgtatggcaactgtttaccaagcaaaaattcactacgcgtggtgggggtcacgtaaaggttgataatgctcccaagctctttttcccgcaccacgctaagggcgcttagcatactcgggatcatcatcagcagaagcgggatcaccgccggaacaatcgctggcaggctttttacgtccgggttatagcgatagcgcgtctcaatattcatcagcccgctttggctggcgggtgtgctttgtcggctcgccacatcctgtaaccagctctggtgcatggcctgcacgtaaccttttaccgtttcagcacggctcggcatcgctccgtcgatccagacgccgagttccacaggcgtaccacgcgcgatatcgcgcccgaaattgggcgggatctcaatcgccaccgtgatatcgcccgcacgcatccgacgatcaagctcgtcataactggtgagcggcggctgttcgataaagtaacgggaaccggagaggttgagtgtccacgcctggctactgacggtctggtcgcggtcgagcaccgcaaagcgcaggttttccacatccatactgatgccgtaacccattatcagcatcaggatcaccgttcccatcagcgccagcgtgctacgtactggatcgcgtcgcagttccagcgcttcgcggcggctgtagctaaacagacggcgcaggctaaatccctgacgcggcgcgtgggtggtgtcgtgtaccacgggcggcgcttcggcttcgttgctctgccctgccgcttcctgcaaataggcgataaatgcctcttccagactggcggctccgcgtttctcaaccagttcctgcggtgtaccgctggcaagcacttttccggcgtgcatcagactgatgcggtcgcaacgttccgcttcgttcataaagtgggtggagatgaagatagtcactttgtcctggcggctgagatcgaccatcaactgccagaacatatccctcgccaccggatcgacaccagaagtaggctcatcgaggattaacatctccgggcgatgaatcaccgccaccgccaggctaagccgctggcgaatgccgagcggcaaactctccggcagaatatcttcaacgtcgttgagcttaaaacgctcgctcatttcagccactcttgcgggaatttccgcttccgggatgtgaaacaaacgggcatgtaactcaaggttttgccgcacggtgagttcgttatagaggctaaacgcctggctcatatagcccacccgacggcgggtatcgatatcttttggatcaaccggttgcccgaacagccacgcctcaccttcgctggcgggcagcagtccggtgagcattttcatggtggtggatttaccgcagccgttgctaccaagaaaaccaaaaatctccccgcgtggaatgcggaaattaacgtgatcaacggcaacgaaggaaccaaaacgcatggtcagatcgcgcgcttcgatggcaatctctgcgttttcaggttgatacggtgggatcactaccgcctgatgcgcctggcgttgcgcttgcggtaacagatttataaatgcttcttccagcgtagcgctttgcgtttgctgccgtagctcttcggcgctgccagttgccagcacttctccggcattcatcgctaccagccagtcgaagcgttcggcctcttccatataggcggtggcgaccagcacgctcatattgctctgccgctggcgaatactgtcgatcagatcccagaactgggagcgggagagcgggtcaacccccgttgttggctcatcaaggatcaacagttccgggtcgtggattaacgcgcagcacagcccaagtttttgcttcatcccgccggagagtttccctgccggacgatcgcgaaacggtgctaacccggtgctggtcagcagctcattgattcgcacttcccgctccgctttgtcgtgaccgaacaggcgagcgaaaaaatcgacgttttcatacacgctcaaggtgtggtagaggtttttgcccagcccctgcggcatccaggcgatgcgcgggcagacgtcgcggcgatgcttcgggtcgcgcatatcgccgcccagcaccatcacattgccctgttcaatgacgcgggcaccggaaatcaagctcaacaagctgctcttcccgacgccgtccgggccaatcagcccgaccatacagcgggccggaatatcgagagtgatattgttcagcgcaacggtttttccataatgctggctcacgcccgccagttgcgcgacaggcgggacgggaaccagttccagatgcgtcattgcggcaacctcaccacgaggtcgtcaggccacggaagttcttcattcacccgcacccacgctacgcccggcaaaccggttttgacatattccagatgctgctggagtaattccggtgggatacgcgctttgacgcggaacatcagtttcagccgttcatcgctggtttcgacggtttttggcgtgaactgggcgacactggcgacaaaactgatggttgcaggaatacgcagatctggcgcggcatcgaggatcagccgggcttcaccgcccagtttcagcgtgcccgcctgttcggttggcaggaagaaagtcatatagacgtcgctgagatcgaccatattcagcacccgaccgcctgccgccagcacttcgcctggctcggcaacccgatactgcacgcgtccgtcacgcggggctttcagttcgctgtcatcgatatctgcggcaatgcgccgttcagtggcttgtgccgcttcgacgcgggtttgcgcctgaatgatattggtgcgtgccgcttctatagccgctttagaagcgcttacctgagctttcgcgctttccagcgcagctcgggcgctctcagcggcggcgcgatcgtcatccagctgttgcgcagaaatagcccctcgttgggccagactacgggaacgcgtatgacgttttgctacggagtccagttctgcctggcgttgattaaccaggctctgtgcggcacgagtttcgctttgtcgttgctccagcaaagcctgcgcggcagcaacggcgctttgtgcctctttgatttgcgcgatggcttccagtcgctgttcctgcaacacgcgagtatccatcttcgccagcacttcaccttcgcgaacaaacttgccttctttcaccagaatggtgtcgatacgcccggcaattttgctggcaatatccacttccgtcgcttcaatgcgcccattactgacagcaaagccttccggcacacctgccgggcgcaacagccaccacgccacgatagccgccaccgccagtaacccgacaacccaccacgccagatggcgcttactcttatccataatcgacccgccataatccctgtaagcaaacgacgcgtgttacaactgccgccgaacgacgttcagcggattcttccatccgggataagaaggaaacggcaaatacgaccagcgcgcagagcattgagcgccaacggggaaggcttagtgaaaacgggtagtaatgttgtcatcatcagcattcctggccgtaaatgaaacacgcatactcataagtgtgatctataaaactggctgacaaaacggtatccatcctgttggatagcgtttcacgcctgttcagttgcaggaacagagcattcctttttacgttttatcaacagtctcaaccagatagtaacattaatattcatgttgtctatggttcagagctgtaacattgtgcgccttctaatcaaaggcataagtccatttctgtttttttcatgctggtaagacttccagggagtggttatctcaggccctgcaccagggttaatttggcaattatgcatgctgaacattcttccagcatgtttactgtcacgggcgttaagacctaaaactgtccccgtttcgcctatgcgttctcttccaccatttccgttatgtgcaacaacttgatttatacctaacatttgactacatgctaatagtgcttcaagtttaggtctgtaatctgtgctaacagaaaaataacgattaaaggatcgacaagagatagcccggctagttttaaactttttgccattaattatagcatgatgctttttattgataattgccgctaattcgaccggatcgagagcattggtcatttcatcaatagagactgttatcggtcctataatgtaacgttttcgctgatcatcaaaagttatcccatgatgatttgccattattttgtatttggggtcatagaaacatacaggataatcttttatcccagagtaggtatcctcatcgagtggtttcatacgcgtgaagttctgcatatagttaccattgcaattcgtttcatgatttccagctaatacatgaacattttcattgatactcattatgcgttttaacaaatcgatgataaattgatcaccacagatattgctaaatcgatcgccggtttggtcgcccagaaacgtacatggcgtcacagcgtctttattaataactaaataaggctgaagactttctaaaataatgtctcttctgttcaggatactgattattgtattaacattagtgttaagttgctcattaaagttctcccttagcaatacgttgagaacttcatcttctatattaagcaactggctaaggaaattttctccttcagccatgattcccaaatgtcccgttgcgaaaagcgcgaacaaaactgcaccgacactgccatcggtatcaccaaaataggttggtctggtacttgtgggatcaacgggtaaacaattggagaaatagattctgtcagcgaactggggttttatcattgtttcgaatttaatatcagatacattatattggcttattttccagttccagatgggtttgtagctctcagtaactgcaacatcattagcattatcatttactgtcatattattaagtaaataaacaatactgcaccaattaatatcggtattatcaagagagcaaccgtaatttttgctattaattgtcacaataaactgataattattattcctacgtagaatatgagcacgcatgccgcttagcatactatatttttcactatgatccgtttgtatggtaaaactaattttgtcatcttgaatagattgttggaaccgttctatttgccaatcatctattttttccacaacctcaccgagcattgtcctggcaatactacttatatcatcacctataccatttgcaatatacccaaacagttctttagtgaagttggtaacatgctcttgcaccatatcatttgttgcgattgtcgttgtactgtcgttagtgcctgccacagttccaattttcatattttacctcatattatttaccgcgaggaatacatagttaacattttatcttatgacatacacctcatgttcgatgggaaaataattatattttgcacaaatcattcagcctcaaagcataatatgaaatttcttatctcatagcagagaaagtccctaaagattgtagaggcgtcatcagaacatgcctctacaatcgattaagaaaacctatgaaatactggcaggattaaaaagacataccaccgtattcatggagttttaatgtagttgaaaacaactaagcccactggaataaattattttattatttttatcacgtgcttccttcagggaatttagccccataataccattatcaaattgttgattatgatctaccccgggcccatgatgcccatatttttgtctaatgtatttgctggggtcttcacctttgagtgtctccccacatatgaagatacgttcacgtgctggtctgaaatcagtagtgttatcaaaataattagcatatacaggtgtgggtttcaaagtattgcttcggattagatggaatagaggatcatccatgtgttctttatgttttttattaaaaatattggctaattcctcaggatcagtaggatttttcatctgattaaatggaacctgcaaagcacgctgacaataacatttttttcttcatctcttattattccgtgatgactggttaaaacttgcctttcactgtcataattacaaacatcgagcgttttaattaagttatacgtatcaccggcagagagtttatgatttgctagtcgtgcagtatagttaccattaaaattgatttcatgatttccagccagaacgacgacatttttattaatacggctatctttattaccctccatatttcgcatagaatttagcaaagtaaggatatatttatcaccaaaaatagtactaaatctatcgcctgtatgatccccaaggaagatacaaggggttatcgcatcgtcctttaaaaaaacatgttgatgcaactcattcaagatcatgtctctcgtatttaataaatcgtagagcactttattatttttatgtttgtatgcagaactagccatctcttcgtgttttaataattcacataataaactccaacccttttccctgatgcctatatgcccactaacgagcaatgcataaagtacagcgcctactcttccatctgtatcgccaaaataagccgtgttggcattttgtgggttaatcacgccacactgtttatagaagtctattttactaaacacagatttaacatagctatcaaacttttccttagtaaacgtctctttagagacatcccaacgccagtcaggtttgaaattaccactaagaagagtaaagaaatttctcgctatgatagaaagcccatcaactttataaattatatcacttttatctccagaggaattaataaaataataaccgcccttacactcaacagtaacggtaatgggagagcttaattttaacacatggttattgtctggtataattgtaaagataaacgtatcagtagtattgtcggcgaatctattatattcttgaatatctatagaaggttcactattataaaaccatactttctccatctggtgactacgatcatttaccttccagtgaccatgttgcaggaaatagatgatatgcaggccaaaatcgttatctatttggctatcattatccagtttatcaaattcaactatctttgcacgatgtgttttatcaaccttgccatggtgttgatgactgttaactttatcactatgcttatcttgatggctactagagatgtttctaatctgattgtcaattgctttcataaataacctgtgatatttttgaattgtttgtaacaaaataaatgatacttgtctgaaaaacagatttacgacgatataaaataataatacttatatgttcgctgattttaagcaccgagactatccggtcttttaccaaataatgaagaataatccctccctggaagataattgtaaaaaacaacagcataagaattaatcttaggataaatttttatttatcatggccttttgaacgctgaaaagtagcgctctgcaaagtaaaccccgctatagttatgctatgcatttgtctttaatgatatctcgtcattatattaacaggatgaaattatcattaatgcatatttcaatattagcagggatacctgaggagtttaaagtgaacatatatatcgggtggcttttcaaattaatccctttgattatgggcttaatttgtatcgcgttaggtggctttgtgctggaaagtagtgggcaaagcgagtatttcgtcgcgggtcatgtgctgatttctctggcggccatatgcctggcattattcactaccgcatttattatcattagccagctcacgcgcggcgttaatacgttttacaatacattgttccccattattggctatgcggggagtattatcaccatgatatggggttgggcactgttagcaggcaatgatgtgatggcagacgagtttgtcgccggccatgttattttcggcgttggtatgattgccgcctgtgtaagcacggtggcagcgagttccggtcactttctgctcattcccaaaaatgcagcggggagcaagagcgacggaacaccggtacaggcttattctagtttaatcggtaactgcctcattgccgttcccgttttactcaccctgctcggtttcatttggtctattacgctgttacgtagtgctgacataactccgcattatgtcgcgggtcacgtattgcttgggttaaccgcaatctgtgcctgtctaattggccttgttgccacaattgtccatcaaacacgtaatacgtttagtactaaagaacactggctgtggtgttattgggttatttttctcggcagtatcacggtactgcaggggatatacgtcttagtcagttccgatgcaagcgcccgactggctcccggcattattcttatttgcctcggaatgatctgttacagcatattcagtaaagtctggctactggcactggtatggagacgtacctgtagcttagccaacagaataccgatgattcccgtcttcacctgcctgttttgccttttcctggcaagctttcttgcggaaatggcgcagaccgacatgggatattttattcctagccgagttctggtcggtttgggagcggtatgctttacgttgttcagtatcgttagtatattagaagcgggttctgctaaaaaataattgcaacgtaccggataaaaccagcgttgaccatttgcgtaacgctggtttttcttaggcatcatgaaataacgcagcattaatgcatagtggttaagtataaaaaacagcaaagttactgtttttttcaacctgttcatatttcataaagatctggccactgagtgagttttcaatcacctttccatccaccttatattaagcatggagggtttcagttcacgggctcattagaaaataatcacaagataaccactatcaaaattagctcatttttaatgcgactctaataattttcatctttaggaaataggtcaggagctctttgctgcaatcaaatcctgcgcacaagcccacgcactgctccacgcccactggaagttatagccccccagccagccggtgacgtccatcacttcgccgatgaagtacagcccaggcactttgcgcgcttccatcgtccgactagagagttcgttggtgtccacgccgccgagcgtcacttcggcagtgcgatagccttcagtgccgttgggttgtacgcgccagtcggtcaatgtgctaatcagtgcctgttggtcacgcacgttgagctgttttaggctaacatccgggatttgcccgagttgctgtaagcgttcaaccaaccgcttcggtagatgaaccgccagtgtgtttttcaggctttgattcggatgtgcgttacgctgctcattcaggaaggtttcgaggtccacatccggtagcagattgatgctgacaaattcccccggttgccagtagctactaatctgcaacaccgccggtccagacaagccgcggtgggtgaagagtaagttctcacggaaaacggtgccgttttcagcggtaatcacggaaggcaccgccacgcccgccagcacctgtaactcttcgagcaacggtttatgcagagtgaatggcaccagacccgcgcgggtcggcagcacgttgaggccaaattgttcggcaatcttataaccaaacgggctcgcgcccagccccggcatactcagcccaccagtcgcgatgaccagcttttcgcaaccgacagtcatgccgttcagatcaagcgtgaagcctgtttcatccttcgccacactcagcacttcgctacgcaatctgaaggtcacattgcccttctcgcactcatccaccagcatgtcgacaatctgctgcgcggagtcatcgcagaagagttgccctaacgttttctcgtgccaggcgatgccgtgtttattgaccagatcaatgaaatcccactgggtaaaacgtgcgagtgcagacttacaaaaatgcggattctggctcagataagcgcctggttcgacataaaggttggtaaagttgcagcgcccaccgccagacataaggattttgcgccctggttttttaccattatcgatcagcagaacccggcgtcctgcctgacctgccagcgcagaacagaacatacccgccgcaccagcgcctataataatggcatcaaacctttccacgttgcgctcctcttagaaaaaacgggcgtgaattgtaaagattcctcagtggtcgcaccagcatcaatattactaaaaggaagtatttgcctgaattatataagataattattttttgagtgaaatccatacagggggcaaatcaaaaaaagtctatatttcactttgcccgcgccgcgaaagtcactgataatgcgccgcgttcatgtcctcaaaatggcgtaacgtcctatgctacatttgtttgctggcctggatttgcataccgggctgttattattgcttgcactggcttttgtgctgttctacgaagccatcaatggtttccatgacacagccaacgccgtggcaaccgttatctatacccgcgcgatgcgttctcagctcgccgtggttatggcggcggtattcaactttttgggtgttttgctgggtggtctgagtgttgcctatgccattgtgcatatgctgccgacggatctgctgcttaatatgggaagctctcatggccttgccatggtgttctctatgttgctggcggcgattatctggaacctgggtacctggtactttggtttacctgcatccagctctcatacgctgattggcgcgatcatcgggattggtttaaccaatgcgttgatgaccgggacgagtgtggtggatgcactcaatatcccgaaagtattaagtattttcggttctctgatcgtttcccctattgtcggcctggtgtttgctggcggtctgattttcttgctgcgtcgctactggagcggcaccaagaaacgcgcccgtatccacctgaccccagcggagcgtgaaaagaaagacggcaagaaaaagccgccgttctggacgcgtattgcgctgatcctttccgctatcggcgtggcgtttagccacggcgcgaacgatggtcagaaaggcattggtctggttatgttggtattgattggcgtcgcgccagcaggcttcgtggtgaacatgaatgccactggctacgaaatcacccgtacccgtgatgccatcaacaacgtcgaagcttactttgagcagcatcctgcgctgctcaaacaggctaccggtgctgatcagttagtaccggctccggaagctggcgcaacgcaacctgcggagttccactgccatccgagcaataccattaacgcgctcaaccgcctgaaaggtatgttgaccaccgatgtggaaagctacgacaagctgagccttgatcaacgtagccagatgcgccgcattatgctgtgcgtttctgacactatcgacaaagtggtgaagatgcctggcgtgagtgctgacgatcagcgcctgttgaagaaactgaagtccgacatgcttagcaccatcgagtatgcaccggtgtggatcatcatggcggtcgcgctggcgttaggtatcggtacgatgattggctggcgccgtgtggcaacgactatcggtgagaaaatcggtaagaaaggcatgacctacgctcaggggatgtctgcccagatgacggcggcagtgtctatcggcctggcgagttataccgggatgccggtttccactactcacgtactctcctcttctgtcgcggggacgatggtggtagatggtggcggcttacagcgtaaaaccgtgaccagcattctgatggcctgggtgtttacccttccggctgcggtactgctttccggcgggctgtactggctctccttgcagttcctgtaatcgtacgcaccaaaacgagcgggtcagctggcccgcttcagattgtgacatagtgcgctttgttcatgccggatgcggcgtgaacgccttatccggcctacaaaaacatgcaaattcaatagattgcagagattatgtaggcctgataagcgtagcgcatcaggcaattttgcgtttgtaatcagtctcgagcgggtcagtttactggcccgctttttttatgcgttattattgctgaagtgcttaatgccaaatcatcaatgcaatcaggctgaccaccaccagaccacacaatgcgctggtcagaataaactgccgacgcacccgctcacagcggcgaataaattcatcatcgtgatgatcgcgataacgttgggcatagatataccaaacgagacgcacctgtttgttgggttggccatgattggtaaaaaagccccctccatcaacatattgatagagcaatggatcgcagttacgcagtaccactaacaacgcgcgtagactactgaaatagcgcgccatgttaacaatgcaaacgacacataaagcccaaaataatgcgacggtgcttatcatacctcctccccggcgacctgcccgcggagttccaccccggggctaccgctcccgatacgctgccaatcagttaacaccaggtcctggagaaaccgcttttgtggtgaccaacatacgagcggctctatagatagtgtaggagatcaggttgttttttttccagaaggttaaccactatcaatatattcatgtcgaaaatttgtttatctaacgagtaagcaaggcggattgacggatcatccgggtcgctgtaaggtaaggatggtcttaacactgaatctttacggctgggttagccccgcgcacgtagttcgcaggacgcgggtgacgtaacggcacaagaaacgctagctggccagtcatcgacaactttatggaaggagtaacactatggcttataaacacattctcatcgcggtcgacctctccccggaaagcaaagttctggtagagaaagcagtctctatggctcgcccctacaatgcgaaagtttctctgatccacgtagatgtaaactactctgacctatacaccgggcttattgatgtgaatctgggtgatatgcagaaacgcatctctgaagagacacatcatgcactgaccgagctttccactaatgcaggctacccaatcactgaaaccctgagcggcagcggcgacctgggccaggttctggtcgatgcaatcaagaaatacgatatggatttggtggtttgtggtcaccaccaggacttctggagcaaactgatgtcttccgcacgtcagctgatcaacaccgttcacgttgatatgctgattgttccgctgcgcgacgaagaagaataatcttccctctacgacgtgttcctgaacgcccgcatatgcgggcgttttgctttttggcgcgccttgttacctgatcagcgtaaacaccttatctggcctacggtctgcgtacgcaatcaaaatccccagccaatacaacatttaacaccatcatattttccatcattagtgtgatcatctggttattttctgttgtaatagtgtattaatctattcaccgcatcaatattaagaatctctgacagatgtaaactttttcgcgcgttatcccttacgcgttcatacttttcaggatggtattggaaggttaataaatatgaatacaacaacacccatggggatgctgcagcaacctcgcccatttttcatgatcttttttgtcgagttatgggagcgattcggctactacggcgtgcagggcgtactggcggttttcttcgttaaacagcttggattcagccaagagcaggcttttgtcacttttggtgcttttgctgcgctggtctatggcctcatttccattggcggctatgtcggcgaccacctgctggggaccaaacgcaccattgttcttggagcacttgtgctggcgattggctacttcatgaccggcatgagcctacttaagcctgacctgattttcatcgccctggggactatcgctgtcggtaacggcctgtttaaagctaacccagccagcttgcttagcaagtgctatccgccgaaagatccgcggcttgatggcgcattcaccctgttctatatgagcatcaacatcggcagcttgatagcgttaagcctggcccctgtgatcgctgatagattcggttatagtgtcacctacaacctgtgcggggcggggttaattatcgcattactggtttacatcgcctgtcgtggaatggtgaaagacattggttctgaacccgacttccggccaatgagcttcagcaaactgttgtacgtgttacttggcagcgtggtgatgatcttcgtatgcgcatggctgatgcacaacgtagaagtcgccaatctggtgctgattgttctctccatcgtcgtcaccatcatcttctttcgtcaggcattcaagctggataaaaccgggcgcaataaaatgtttgtcgcctttgtcctgatgctcgaagcggtggtgttttacattctctacgcccagatgccaacaagcctgaacttctttgccatcaacaacgtgcatcatgaaattctcggtttttccatcaacccggtcagcttccaggcgcttaacccgttctgggtggtactcgccagcccaatactggcaggcatttacacgcatctgggtaacaaaggcaaagacctcagcatgccgatgaaatttactctcggcatgtttatgtgcagtctgggctttttgacggcggcagctgcgggaatgtggtttgcggatgcacaagggctgacaagcccatggtttatcgtgctggtgtacttattccagagcttaggtgaactgtttattagcgcccttggcctggcgatgattgctgccctggtgccgcagcatttgatgggctttattctcgggatgtggttcctgacgcaggctgccgcgttcttgctgggcggctatgtggcaacatttaccgcggtgccggacaacattaccgatccgcttgagacgttgcccgtctataccaacgtgtttggtaagattggtctggtcacgctgggcgttgcagtagtgatgctgttgatggtgccgtggctgaaacgcatgattgcgacgccggaaagccattaattattcttgcagaaagcagggtagcgttatcgctaccctgttttagttttacactggcgtacctgcatagatatcaaagcgatgccctttagtgactaccgcgtttggcgtggcgacattcgccagcggtggcgcgtagtccgggcgctttaccaccacgcgtttggtcgccagcaagcgtgcaggctccagtaatccatcggcatcaagatccggtcccaccaggctctgaaagacacgcatctcttttttcactagcgcgcttttctgcttatgcgggaacatcgggtcgagataaaccacctgcgggcgcggggtaatatcagtcagcgccgtcaggctggaggcgtgaattaactgcaaccgctcctgcaaccagccgccgatttccgcatccgcataaccacgcgccaggccgtcgtcgagtagcgcggcaaccactggattacgctccagcatccgcacgcggcagccgacactagccagtacaaaggcatcgcgcccaagtcctgcagtggcatccaccacatccggcaaataatcgcctttaatgcccaccgctttcgccaccgcctcaccgcgaccaccgccgaatttgcgtcggtgcgccatcgctccgccaacaaaatcaacaaagatgccgccaagttttggctcatcacgcttgcgcaattccagatgttccggcgttaacaccagcgccatcaggttgtcttcatcgtgctccagcccccagcgggccgccagaacagataaggcaccgtctccggtgcctgtttcatcaattaagcagattttcactgaatgatcagcccttaatgccgtaatgctccagcatcgcatccagctgcggttcacgaccacggaagcgtttgaacagatccatcggctcttcactaccgccacggctcagaatgttgtcgaggaagctctgcccggtttcacggttgaaaatgccctcttcctcaaagcggctgaaagcatctgccgccagtacgtcagcccacaggtagctgtagtaacctgcggcataaccaccggcgaaaatatggctgaaagcgtgcgggaaacggccccaggacggggatggcaccacggcaaccagtttcttgatttctgccagagtttcgaggatttttgccccctgatccgggcggaactcggcatgaaggcggaaatcaaacaggccgaactccagctgacgcagaataaacagcgccgcctggtagttcttcgccgccagcattttatccagcaactctttcggcagcggttcgccggtttcatagtgaccagagataaacgccagcgcctccggctcccagcaccagttttccataaactgactcggcagttcgaccgcatcccacggcacaccgctgataccggaaacaccagcggtttcgatgcgggtcagcatatggtgcaggccgtgaccgaactcgtggaagagggtgatcacttcgtcgtgagtgaacagcgccggtttaccatttaccgggcggttgaagttacaagtcaaatacgcgaccggtttttgcaaagaaccatcagctttacgcatctggcctacgcagtcatccatccacgccccgccgcgcttgttttcacgggcatacagatcgaggtagaagctaccgcgcagttcgttattttcgtcatacagttcgaagaaacgtacatccggatgccagacatcaacatctttacgctctttagcggtgatgccgtaaatacgcttaaccacttcaaacaggccgttaaccgctttgttttccgggaagtacggacgcagctgttcgtcactgatgctgtagaggtgctgtttttgtttttcgctgtagtaagcgatatcccacggctgcaactcatcgacgccaaattcggctttggcaaaggcacgcaattgcgccagctctttttcgccttgtggacgcgcgcgttttgccagatcggttaagaaatccagcacctgctgcgggttttctgccattttagtggcaagggatttaaaggcgtagttttcaaagcccagcagttgcgccagttcgtgacgcagcgcgaggatctcttccatcaccttgctgttatcccatttaccggcgtttgggccttgatcggaggcgcgggtgctgtaagcgcgatacatctcttcacgcagagcctggttgtcgcagtaggtcattaccggcaagtagcttgggatatccagcgtcagcaaataaccttccagctctttcgcttcggcctgggcttttgccgcagccagcgcgctttctggcatccccgccagctccgcttcgtcggtaacgagtttggtccagcccattgtcgcatcgaggacgttgttgctgtactggttgcccagttcagaaagacgggtcgcaatttcgccgtaacgctgctgtttctctttcggcagacctatgccagagagttcaaagtcgcgcagtgcgttatcaaccgctttcttctgcgccgtgttcagcgtggcgtaatgatcgccatcgcgcaggtcgcgatacgctttatacagcccttcatgttgccctacccaggtgctgtattcgctcagcagcggcagggtttgttcgtaggcttcacgcagttccgggctatttttcacgctgttcaggtggctgaccggggagaagatacgccccaacacatcgtccacttccgccagcggctggcagagattttcccaggtgtacggtgccccttgcgctactacgcgctccacgttttcgcggcagtcgttcaatgccttagtcacggctggaacgacatgttccgggagaattttagaaaacggaggcaattcaaagggagtcagtaacggattcgtcattcgcgcagtcctggttaaagaggttaaggaagcgctcaacaggcgctttacataatgtgtgtagcatggggttaagtgtagtgaatttcaatgagaaacgttacgctttcgcggcggcggcctcttttcggtatactgtcctgatacgcttttgtgcgccccgaatacgggccgatttttacttaccggaacacctttacccatgctcagttatcgccacagctttcacgctggcaaccacgccgacgtccttaaacataccgttcagagcctgatcatcgagagcctgaaagagaaagataaaccgtttctctatctcgacacccacgcaggggccgggcgttatcagttaggcagcgaacatgccgagcgtaccggcgaatatctcgaaggcatcgcccgtatctggcagcaggacgatttgcccgcagaactggaggcgtacatcaatgtggtaaaacacttcaaccgtagcggtcagttgcgttactaccccggtagcccgttgattgctcgcctgctactgcgtgaacaggacagcctgcaactgaccgaactgcacccgagcgattacccgttgttgcgttctgaatttcagaaagatagccgtgcgcgtgtcgaaaaagccgacggtttccagcagcttaaggccaaactgccgccggtttcccgccgtggtttaatccttatcgacccgccgtatgaaatgaaaactgactatcaagcggtggtcagcgggatagcagaaggttacaaacgtttcgccactggtatttacgcactgtggtatccggtggtgctgcgtcagcaaattaagcgcatgatccacgatctggaagcgaccggtattcgcaaaattctgcaaattgaactggcggtactgccagacagcgatcgccgtggcatgaccgcttccggcatgattgtgattaacccgccgtggaaactggaacaacagatgaataacgtgctgccgtggctgcacagcaaactggttccggcaggcaccgggcacgccaccgtaagctggatcgtgccggagtaattgcagccattgctggcacctattacgtctcgcgctacaatcgcggtaatcaacgataaggacactttgtcatgactaaacactatgattacatcgccatcggcggcggcagcggcggtatcgcctccatcaaccgcgcggctatgtacggccagaaatgtgcgctgattgaagccaaagagctgggcggcacctgcgtaaatgttggctgtgtgccgaaaaaagtgatgtggcacgcggcgcaaatccgtgaagcgatccatatgtacggcccggattatggttttgataccactatcaataaattcaactgggaaacgttgatcgccagccgtaccgcctatatcgaccgtattcatacttcctatgaaaacgtgctcggtaaaaataacgttgatgtaatcaaaggctttgcccgcttcgttgatgccaaaacgctggaggtaaacggcgaaaccatcacggccgatcatattctgatcgccacaggcggtcgtccgagccacccggatattccgggcgtggaatacggtattgattctgatggcttcttcgcccttcctgctttgccagagcgcgtggcggttgttggcgcgggttacatcgccgttgagctggcgggcgtgattaacggcctcggcgcgaaaacgcatctgtttgtgcgtaaacatgcgccgctgcgcagcttcgacccgatgatttccgaaacgctggtcgaagtgatgaacgccgaaggcccgcagctgcacaccaacgccatcccgaaagcggtagtgaaaaataccgatggtagcctgacgctggagctggaagatggtcgcagtgaaacggtggattgcctgatttgggcgattggtcgcgagcctgccaatgacaacatcaacctggaagccgctggcgttaaaactaacgaaaaaggctatatcgtcgtcgataaatatcaaaacaccaatattgaaggtatttacgcggtgggcgataacacgggtgcagtggagctgacaccggtggcagttgcagcgggtcgccgtctctctgaacgcctgtttaataacaagccggatgagcatctggattacagcaacattccgaccgtggtcttcagccatccgccgattggtactgttggtttaacggaaccgcaggcgcgcgagcagtatggcgacgatcaggtgaaagtgtataaatcctctttcaccgcgatgtataccgccgtcaccactcaccgccagccgtgccgcatgaagctggtgtgcgttggaagcgaagagaagattgtcggtattcacggcattggctttggtatggacgaaatgttgcagggcttcgcggtggcgctgaagatgggggcaaccaaaaaagacttcgacaataccgtcgccattcacccaacggcggcagaagagttcgtgacaatgcgttaaatgttaaagggctaagagtagtgtgctcttagcccttaattacgtttccgctatcagttcagaagctgaagcagaaagcggatcagttccagcagcgcaattaacgcccctagaacgatgattgctttatcaatcacccgttttctccatgcgatggagtgagaatgcatccgcttactcatccactgcctgtcacggcgcatgtctcattgttagataagaactctctcactccggccagagcatcagttaacggcaccacccgtacttctgaccaggactttgaaagcgtttatgcgcattgccagagtgaaaatgcctcagagctaactggataatcatacagtacatgcaggttataaaaccagcacgtccttgcaatagtttcagtatggtattagcattgatgcgttagatgatggctatctcactccagtcagagccaccaactcagggctggaaagtaaaaaaccgacgcaaagtcggtttttttacatccggattcggacaaggcttaatatgacgatgacccagtgaaagtatataaatcgtcactgcgatatataccgaagtgctccctccgccagctgaagaaatcgctaattcttgcaatgttagccactggctaatagtattgagctgttagataagaactctctcactccagccagagccaccaactcagggctggaaagtaaaaaaccgacgcaaagtcggtttttttacgtcctgattcagacctcctttcaaatgaatagccaactcaaaattcacacctattaccttcctctgcacttacacattcgttaagtcatatatgtttttgacttatccgcttcgaagagagacactacctgcaacaatcaggagcgcaatatgagttttctgttacccatccaattgttcaaaattcttgctgatgaaacccgtctgggcatcgttttactgctcagcgaactgggagagttatgcgtctgcgatctctgcactgctctcgaccagagccagcccaagatctcccgccacctggcattgctgcgtgaaagcgggctattgctggaccgcaagcaaggtaagtgggttcattaccgcttaagtccgcatattccagcatgggcggcgaaaattattgatgaggcctggcgatgtgaacaggaaaaggttcaggcgattgtccgcaacctggctcgacaaaactgttccggggacagtaagaacatttgcagttaaaaatttagctaaacacatatgaattttcagatgtgttttatccgggaggcattatgttactggcaggcgctatctttgtcctgaccatcgtattggttatctggcagccgaaaggtttaggcatcggctggagtgcaacgctcggcgcagtactggcgttagttacgggcgtggtccatccgggtgatattccggtggtgtggaatatcgtctggaacgcgacggctgcgtttatcgccgtcattatcatcagcctgctgctggatgagtccggcttttttgaatgggcggcgctgcacgtcagtcgctggggtaatggtcgtggtcgcttgctgtttacctggattgtcctgctcggtgctgccgttgccgccctgtttgccaatgatggcgcggcgcttattttgacaccgattgtcatcgccatgctgctggctttagggttcagtaaaggcactacgctggcgttcgtgatggcggccggattcattgccgataccgccagcctgccgcttattgtctccaacctggtgaatatcgtttccgctgatttctttggcctcggctttcgcgaatacgccagcgtgatggtgccggtggatatcgccgcgattgttgccacgctggtgatgttacatctctattttcgcaaagatattccgcagaactacgatatggcgctgctgaaatctcccgcagaagcgatcaaagatcctgctacgttcaaaactggctgggttgttttactgcttctgctggtgggatttttcgtcctggaaccgctcggcattccggtgagcgccattgcagctgtgggcgcgctgatattatttgtcgtcgctaaacgcggtcatgcgattaatacgggtaaagtcctgcgcggtgccccctggcagattgtcatcttcagcctcggcatgtatctggtggtttatggcctgcgcaatgccggattaacggaatatctttctggcgtactcaacgtgctggcggataacggcctgtgggccgcgacgctcggcaccggattcctcaccgccttcctctcttctattatgaacaatatgccgacggtactggttggcgcgttgtccattgatggcagcacggcatctggcgttatcaaagaagcgatggtttatgccaatgtgattggctgcgatttgggaccgaaaattaccccaattggtagcctggctacgctactctggctgcacgtacttagccagaagaatatgactatcagctggggatattacttccgtacagggattatcatgaccctgcctgtgctgtttgtgacgctggctgcgctggcgctacgtctctctttcactttgtaatgagatactgatatgagcaacattaccatttatcacaacccggcctgcggcacgagccgtaatacgctggagatgatccgcaacagcggcacagaaccgactattatccattatctggaaactccgccaacgcgcgatgaactggtcaaactcattgccgatatggggatttccgtacgcgcgctgctgcgtaaaaacgtcgaaccgtatgaggagctgggccttgcggaagataaatttactgacgatcggttaatcgactttatgcttcagcacccgattctgattaatcgcccgattgtggtgacgccgctgggaactcgcctgtgccgccctagtgaagtggtgctggaaattctgccagatgcgcaaaaaggcgcattctccaaggaagatggcgagaaagtggttgatgaagcgggtaagcgcctgaaataaagcggcgatatcccccccacaggttgttagaaaagtgcgctttatttatgtcggatgcgacgctggcgcgtcttatccgacctacaaagttatgaaaattcgatgaatagtatgttatttgtaggcctgacaggcgtagcgcatcaggcgattttgctatttacacagtactccctgcgtgagattccaattatcgcgtccagcatggtgtatcagtgagctgcttagttatcagcgatacagcgcagtagtttaaagacgtactggattatgatttatcagtggtttacacaacaaattattaaataattataagataccttaacccattttattattacacatctaaaacatcacaaaaaaaaatcacttcacacactatcagagaacataataactttttaaaatgagcgcattttgatagttgttaacgatttcctttacgatactatcactaccctttttttacacacaaatattaccgggtggagataaaagggaaatcaaaggtaattatatcaggaagatataacgcattacatttattgtgtgtagaagaaaatccattcctgttctaattatccaatttaaacatcttagcataaaacaaatgatgaataaggaattttatattgattattagcactttataatcattgaataaaaatagattttatgtacttttaaaacaatgcactatattatggggtgatggatattcatgtcacgccccaaaattaactgagttcacctaaacagaaaggatataaacatcagacaggtttacgttactatcaggcatatcacctcagaatcagatgaaaactataaagaaatatctattatggttttaatatttgttgataaggatagtaacatgaacatgacaaaaggtgcactcatcctcagccttagttttttgcttgccgcatgtagtagtattccgcaaaatatcaaaggcaataaccaacctgatattcaaaaaagttttgttgctgttcataaccagccggggttatatgttggtcaacaagcgcgctttggtgggaaggttatcaacgttatcaatggcaaaacggatacgttgttagaaatctctgtattaccgttggatagctatgcgaagcctgatattgaagccaactatcagggccgactgctcgccagacaaagcggcttccttgatccagtgaactatcgtaatcactttgttaccatcctcggcaccattcagggtgaacaacctggctttatcaataaagtcccgtataacttcctggaagtgaatatgcagggcatccaggtgtggcatttgagagaagtggttaataccacctataacctgtgggattacggctatggtgcattctggccggaaccgggctggggtgcgccttactacaccaatgcggtgagtcaggtaacacctgagctggtcaaataacaccaccgaaagatgcagatgctttctcagcatctgcatcatgcattacatcaaattaatacacagtaagctaactattattattataagccctgtcctgttaattacctttggcaaactgattataaagttaatgtccgcaccaggagtcggttatgtttcttataattaccagggatacgatgttcttcaccgcgatgaaaaacattctgagtaaaggtaatgtcgttcatatacagaacgaagaagagatcgacgtaatgttgcatcagaatgccttcgtcattattgatacattaatgaataatgtatttcattctaattttctcactcaaattgaacgattaaaacctgtccatgtcattattttctccccctttaatattaaacgctgcctggggaaagtgccggtgacctttgttccgcggactatcactatcattgattttgtcgcactcatcaatggcagttactgctctgtgcctgaagcggctgtgagtcttagccgcaagcaacatcaggttctgagctgcattgcgaatcaaatgacaacggaagatattctggagaaactgaaaataagcctaaaaacgttctactgccataaacacaatatcatgatgatcctcaatcttaagcggatcaatgagctggtacgccatcagcatattgattatctggtgtgaatttcaggcttacggtgagtctggctacgctgccacacagattagctaatactaacgcctttcacccctgccataccttttaataatcgcaacaggtcttctatgctcgttgtggcatgaagctggatatcaatggcgaccacttcatgatcttcattttcctgcaagctaactaaatcagtttttattttttgctgcttaaaccagtcgagcatacttaccgtattaccgttcactaatgtcagctgtaaatggtaatttttgttcatcaggcggaaggttaattgatggaagacttccagcaccaacaaggtcatcacactaccataaatacccagttcgtacataccgctgccaataaccatacctatggcggcggtcacccagatatccgctgccgtcgtcagacctacaatattttggttacgaacgagaatgttacctgcaccgataaacccgacgcccgtcaccacctgagcagcaatacggctggggtcgagtccgacgtgatctaaagacagcacgtcagcaaaaccatatttgctaacaatcataaacagggcgcttcccatgccaattaatacatgtgtgcgtaaccctgctcctttgccgcgcatttgcctttccatgccaatagcgccacaggcaattgccgcgagtataagacgtataataaattctgctgtcatataaaaatgcaaaaaggagcagcaagatggctcaacttgctactcttttttacttgcacctcattaattcggcaagtcattagatgcttgatttttgaaggtatacaaatttttctgcgggtttttcttacagtattcgatcactttaggaatttgagtgagatcggtttcatttaaagtaacggtatcgccacctttatatactgtttcttcatgcagcatccaccatgcaaccggggtcattgcttttggattcagatcaataaattcctggcaggtcatatctttagcggattcattggctgccaacgcagattgtgcgttcaccagactcaaagccgctacagcgcccataaaaataaacgctttacggagagaactaatattcattttgtaacccattcaatatagagattatatatgaacaggaggaatagctgcttttaaagaagatattccggcctgttcaatatgcaaggaagtacgatgtaacgcattcccggaattacatatctttcttaattttgtcccattcgcctttaactttatctttaaagttggcttgtttatcctgagtacaagcctgaacgatagctggggttacggttgcaataccctgaacatctaaaaccgcatcttctggtttatctttgttgttcagcgcttcagcaaaaccaactgcagttggctggaaggattcgtccacagccaggaaatcttcacaggtccaggagttgaccggttttttgttatcagctgctttttgcgcatccgctgcattgctcacaactggcagaagaagcagaccaccaagaataacgcctaatacttttttcatcgtaatatcctcaactataaagtgaaagagccgtcacgaatcaatttcgacactgaggttataacctggttttctgtatatgtcatgttgatggaaaatatcaaaatcagatatttttatttcaatacaatgagttacagatgcatcagatactgcaattaggaaatttttattaaatcgactgcattcttagacgcgtttttggcatagattgatagcaggggattttcttcttaattttatagggtggttctatgttatatatagataaggcaacaattttgaagtttgatctggagatgcttaaaaaacatcgcagagcaatccagtttattgccgtgctgctgtttatcgtcgggttgctgtgtatcagtttcccgttcgtctctggcgatattttaagcacagtagtgggtgcattattaatctgcagcggtattgcgcttattgtcgggttattcagcaaccgcagtcataatttctggccggtattatccggtttcctcgtcgcagtcgcctatttattgatcggctatttcttcatccgcgcaccggagctgggcatttttgccattgcggcatttattgccggtttgttctgtgttgcaggggttattcgcctgatgagttggtatcgtcagcgtagtatgaaaggcagctggctacagctcgttattggtgtgctggatatcgtcattgcctggatattccttggtgcaacgccgatggtgtctgtaacgctggtttccacactggtgggaattgaactgatatttagcgccgccagcctgttcagcttcgccagtttgttcgttaagcagcaataattaccccggttgtcacccggatcatagtcacttgatgtgactatgatccgattaatactctctccgctacgcagtgttgtagatcaattgcgcactatcattgaaataattacctgctagtgattatttcaacctactgaatttcatctaatttttttcactctatggcaaattagccatttcaaacattatcatggctgatattttccgtagtcaggtttaatgttttaaaagtgctgtgggaaagtgaacaaagagttccgtaagcgttgatgctatgggcggttaaataagtaatccgggttcatttttttgcaactggcgttgattacattgcataaatatccgtgtctccagacgctatataaaaacctgaagacatgaatgcgttatttactcaggtaatttcaatgcgttaaaagaaagctggcaatccaattgccagcttaagtcgaaacaaggagactcgatatttaaatcggattacattttaactttagtaatattcttcagagatcacaaactggttattgataacttattcttgggcagtaatccgcaaacgttaactttttgtttgctatttacaagctgataacaaccaggaatcttacttaggatcaatatatggagtgcgtgatggataaatctgaagtattgattagtgttaatagacgtattagttcacgaagggtaaagttcttataggcgtttactatattgaacaacgattcggacaaggatgtaaataatgaaaaggatgacatattcgaaacgataacggctaaggagcaagttatgatttttctcatgacgaaagattcttttcttttacagggcttttggcagttgaaagataatcacgaaatgataaaaatcaattccctgagtgagatcaaaaaagtaggcaataaacccttcaaggttatcattgatacctatcacaatcatatccttgatgaagaagcgattaaatttctggagaaattagatgccgagagaattattgttttggcaccttatcacatcagtaaactaaaagctaaagcgcctatttattttgttagccgcaaagaaagtatcaaaaatcttcttgagattacttatggtaaacacttgccccataagaatagtcaattatgttttagtcataatcagttcaaaattatgcaactgattctgaaaaataaaaatgaaagcaatatcacgagcacgctcaatattagccaacaaacattaaagattcagaaattcaacattatgtacaagctgaaactaagacgtatgagcgacatcgtcaccctgggtatcacatcttatttttaatcaggacataagcaactgaaattgatggctggcatgacgagggatgcagatgctgatttcattacccccggtgattactaaaggagaggctaaaacgactttattcccctggtatgtgtatccaccagtagaacccttcgttgcccgaatgctggcaggaactgttggcagaacggcaacattttttttgtcgttgacctcaccatgtcgatcactgtgcctgtatcccaccttactggctgacaaccccactatgccgctggtctgtaaatccctcatatctctcctcgcgcgcaatttaaagaaccgttatttctcaagaattttcagggactaaaatgaacagaagaagaaagctgttaataccgttgttattctgcggcgcgatgctcaccgcctgcgatgacaaaagcgcggaaaacgccgccgccatgacgcctgaggtcggtgtcgtcacactctcccccggtagcgtcaatgtgttgagcgaattgcccggtagaaccgttccttatgaagttgccgagatacgtccccaggtgggcggtattatcattaaacgcaactttatcgaaggcgataaagtgaaccagggcgatagcctgtatcagattgatcctgcacctttacaggccgagctaaactccgccaaaggcagcctggcgaaagcgctctctaccgccagcaatgcccgcatcacctttaaccgccaggcaagcttgctgaagaccaactacgttagccgtcaggattacgacaccgcgcgcacccagttgaatgaagcagaagccaatgtcaccgtcgccaaagcggctgttgaacaggcgacgatcaatctgcaatacgcgaatgtcaccagcccgattacgggcgtcagcgggaaaagcagcgtgaccgtcggcgcactcgttaccgctaatcaggcagatagcctggttaccgtacaacgtctggacccgatttatgtcgatctcacgcagagcgtgcaagatttcttacgcatgaaagaagaggtcgccagtgggcaaatcaaacaggttcagggcagtacgccagtacagctcaatctggaaaatggtaaacgctacagccagaccggcacgctgaaattctccgacccgacagtggatgaaaccacgggctccgtgacgttacgggcgattttccccaacccaaatggtgacttgctgcctggcatgtacgtcacggcattagtggatgaaggtagccgccagaatgtattactggtgccgcaggaaggcgtcacccacaacgcccagggtaaagcaacggcgctcattctggataaagacgatgtcgtgcagctacgcgaaattgaagccagcaaagccatcggcgaccagtgggtcgtcacctctggcttgcaggctggcgatcgggtgatcgtttccggtttgcaacgcattcgtccgggtatcaaagcacgagcaatttcctccagccaggaaaacgccagcaccgaaagcaaacaataacgttgcaggcttaaggggactttcatggctaactattttattgatcgcccggtttttgcctgggtacttgccattattatgatgcttgcaggtggtctggcgatcatgaacttaccggttgcgcagtatccgcagattgcgccaccgaccattaccgtcagcgctacctatccaggtgccgatgcgcaaacggtagaagacagcgtcactcaggtgattgagcaaaatatgaatgggcttgatggcctgatgtacatgtctagtaccagtgatgcggcgggcaatgcctctatcactctgaccttcgagactgggacatctcctgatatcgcacaggttcaagtgcaaaataaactgcaactcgctatgcctagtttacctgaagcagtgcagcagcaggggattagcgtcgataagagcagcagtaatatcctgatggtagcggcgtttatttctgataacggcagcctcaaccagtacgatatcgcggactatgtagcgtctaatatcaaagacccgctaagccgtaccgcgggcgttggtagcgtacaactctttggttccgagtatgccatgcgtatctggctggacccgcaaaaactcaataaatataacctggtaccttccgatgttatttcccagattaaggtgcaaaacaaccagatttccggtggtcaactgggtggcatgccacaggcggcagaccagcagctaaacgccagcatcattgtgcagacgcgtctgcaaacgccggaagaatttggcaaaatcctgttgaaagttcagcaagatggtagccaagtgctgctgcgtgatgtcgctcgcgtcgaacttggggcggaagattattccaccgtggcacgctataacggcaaacctgctgccgggatcgccatcaaactggctgccggagcaaacgccctggataccagccgggcagtcaaagaggaactgaaccgcttaagtgcctatttcccggcaagtctgaagacggtttatccttacgacaccacgccgtttatcgaaatttctattcaggaagttttcaaaacactggttgaggctatcatcctagtcttcctggtcatgtatctgtttttgcagaatttccgtgccacaatcatcccgacgattgccgtaccggtggttattctcgggacgtttgcgatcttgagcgcggtcggtttcaccatcaacacgttgactatgttcgggatggtgctggcgatagggttactggtggatgacgccatcgtggtggtggagaacgtcgagcgtgtcattgcggaagataagctaccgccgaaggaagcgacgcataaaagcatggggcagatccaacgtgcgctggtcggtattgccgttgttctttccgcagtgtttatgccgatggcctttatgagcggtgcaaccggggagatctaccgccagttctccatcacgctgatctcctccatgctgcttagtgtatttgtggcaatgagcctgacccctgccctgtgcgccaccattctgaaagccgcgccggaaggcggtcacaaacctaacgccctgttcgcacgcttcaacacgctgtttgaaaaaagtactcaacactataccgatagcacccgcagcctgttgcgttgtaccggtcgctacatggtggtctacctgctgatttgcgccgggatggcggtgctgttcctgcgcacgccgacctctttcttaccagaagaggatcagggggtatttatgaccaccgcgcagttaccttccggtgccaccatggttaacaccacgaaagtgctgcaacaggtgacggattattatctgactaaagagaaagataatgtccagagcgtgtttaccgttggcggctttggcttcagcggtcaggggcaaaacaacggcctggcgtttatcagtctcaagccgtggtctgaacgtgtcggtgaggaaaacagcgttaccgcgatcattcagcgggcaatgattgcgttaagcagtatcaataaagccgtcgtcttcccgttcaacttacccgcggtggctgaactgggtaccgcgagtggttttgatatggaactgctggacaacggtaacctggggcacgaaaaactaacccaggcgcgaaacgagctgttaagtctggcagcgcaaagtccgaatcaggtcaccggggtacgcccgaacggcctggaagatacgccgatgttcaaagtgaacgtcaacgctgcgaaagctgaagcgatgggcgtggcgctgtctgatatcaaccagacaatttccaccgccttcggcagcagctacgtgaacgacttcctcaaccaggggcgggtgaaaaaagtgtatgtccaggcaggcacgccgttccgtatgttgccggataacatcaaccaatggtatgtacgcaacgcctctggcacgatggcaccgctttctgcctacagctctaccgaatggacctatggtagtccgcgactggaacgctacaacggcatcccgagtatggagattttaggtgaagcggcggccgggaaaagtaccggtgacgccatgaaatttatggcagacctggtcgctaaacttccggcaggcgtcggctacagttggaccggactaagctatcaggaagcgttatccagtaatcaggctcctgcgctgtatgcgattagtctggtcgtggtgttcctcgccctcgccgcactctatgagagctggagtattccgttcagcgtgatgttggttgttccgttaggcgtcgttggcgcattactggccaccgatctgcgcggcttaagtaatgacgtctacttccaggttggtttgctgaccaccatcgggctttccgccaaaaacgccatcctgattgtcgaatttgccgttgagatgatgcagaaagaagggaaaacgccgatagaggcaatcatcgaagcggcgcggatgcgtttacgcccaatcctgatgacctctctggcctttattctcggcgtgctgccgctggttatcagtcatggtgccggttctggcgcgcaaaacgcggtaggtaccggcgtgatgggcgggatgtttgccgcaacagtgctggcaatttacttcgttccggtctttttcgttgtagtggaacatctctttgcccgctttaaaaaagcgtaacgtgtaaatgagagtaaggttgaacatgaaggttcagccttactctttcctgctaaccattcaccactcaacaaccagctaaccgtcaggaataccaggcttagtacacagcactgaaagtagaaaccactccagccattcgtcatcaatttgaacaacacaatactgacccacattcccgtaatcgtatgaattgtcagcttaataatcccaaacatgccgagtcttttcctcctgaaaataccgataccgcctggcaaactgcgaaagagaactagccggtagcccggcagaaatcatcagggaagagtttcacatgaagcaggtgtgagatcctgaccaatattcaaatgcgaaatatgtcaggaaaaggtacctgggctatgttgcgcaaactgatgtggcgttacaccataatattgtcgaaatgtgtttataaagtagcttgtactgctatagccacatttttccgcaatagtatgcagaggaatttgacgtaactcgagtaatcgtctggccatgctcatcctggaggcgagtaatattttactgaaacaggtattttcatcctgcaacttttttttgattagactctcgctggtatacattctttccgcgatatcgcgcagataccaacgtttggcgatatcaaagctaataaggcgttcaacttttccactaacagtgctgatgctattgaaaagtaaggggatcagttctttcttatgagaaaacatgcttaaacaggaaaggtagagcatattgctcagtatcggactatttaccccggattcattgaagctatcaaaaatcgccgtcaccagcggcatggggggactctggttaattaacaaacggtctttgctgtgtaaccctaaattgcgtggtagctgacgaatattttgtaagtaatggcaaactgtcagctcatcgatatccagtcgtcgcgtatccggactacaaaacgcaaaatcgtctgccaaatttttctccagcagcagaatactctcgttatgcaggcttattttttgctgttcatgataaatatcgaaactacgacgaatgaggatcacgctgcagacatgagtcatgattatcccttatatttcatactgcgattatttcaatttcagtatactaatgaaatgatgccagactgtttcttagcgcaaaaactgccagatttggtaggaccaaaatttatccacaaagtagttttgcataacagttaattgataataagtaaatgcagcacgaatatattttcgcacagcgtatagcttatgtttataaaaaaatggctgatcttatttccagtaaaagttatatttaacttactgagagcacaaagtttcccgtgccaacagggagtgttataacggtttattagtctggagacggcagactatcctcttcccggtcccctatgccgggttttttttatgtctgagtaaaactttataatcttattccttccgcagaacggtcagtgccgtaaaaattcccttgcgcaacaatacttgccgcgctgtcacggttgctcaatctctgcgcgcttcgctcctgatactctgtgggcgtcatcccataataatttcgaaagacgtaaatgaaatagctcacgctgtgatatccacaggatactgcaactcgcttaatactaaaaccatgtataacaataagttgcaaagcacgttgcattctacactcagtaagcaactgactataacttgtctcttcttcgcgcaattttttctttaacagacttggactcatcaacagctcgctggcgattcgggctagtgtccactcatgggcgatattattattgataaccgtacaaactcgtgttcgcatgttcggttgtaaaacgttcagaagcagcggtataaagtgctcatcctcaagaaaaacagataacaacgcaaagattaatgctcttttacgtagcatttctgcatagcgaagattcttattctggcttagttgcgcaacttcctgaaaaacaggaatatctctactacagtgatgaacgagtaaactagaaacttttttatgtgcatgaagatttaatgcctcctccttgagcatcgggagaaataaactaagcgtgtccctactcacgaatacaaaattttcaacacacttatctactcgaatttggcttgcatccgcaaaaaccaggtcaccgccattaaaatagcgatattcaccattaaccatggtgagaatatatttatgtcttgcatacgcaattagacaattcccatgtagactttgcatagttgacttaatattacataaacatattactgtttattaatgtagcacgccgccctcttaagtcaaattgattgataaataaatttaaacgaagcgggagaacaggatgataatgtgtgatgttctacgggcaggatgactggatttataatacaaaaacgtgtttaagaacacagggaaattaatagtaagcaaataatcccttttcgtgacattaaaggtaatcgctacatttaataaacattcatataacatatatcttatcaacacgatgaatagacagccaatatattattgcgattaataagcaaccgaatgcccagctgtttttttaaaggctgggcattcggtttttacaacgttatgttatcaggtgtgtttaaagctgttctgctgggcaataccctgcagtttcgggtgatcgctgagatatttcagggaggctttgtagtcttccagcaacagttcagcaaagtccatttcgaagccgcgacgacacataatgcgcatcaccacgatgtcggtggcttcaccgccgagagtgaaggccggaacctgccagccgcgcagacgcagacgttcagagaggtcgtacagggtgtatcccggatcttcaccatctttcagtttgaagcaaaccgccgggatgccttcgtccgggcgacccgtacagatgaactcatacggccccagtttggcgatttcatccgccagataagcggcaacctggtaagaggcgttctgtactttggtatagccttcacgaccgaggcgcaggaattcatagtactgtgcaattacctgacccgccgggcgggagaagttgatggcaaaagtaccaatttgaccacccaggtagtcaacgttgaacaccagttcctgcggcagcgcttcttcgtcacgccagataacccagccgcagcccagcggagccagaccgaatttatggccactagcactgatgcttttcacacgcggcaggcggaagtcccagacgatatccggggcgacgaacggtgccaggaagccaccgctggcagcgtcgatgtgcatgtcgatgtcgataccggtgtcggcctggaatttatccagcgcatcgtgcagcggttgtgggaactcatagttaccggtgtaggtcacgccgaaagtcggcaccacgccgatggtgttttcgtcacaggcttcaatcatgcgtttcgggtccataaacaactgaccggggcgcatagggatctcacgcagctccacatcccagtagcgggcgaatttatgccagcagatttgtaccggaccgcacaccaggtttggtttatccgttggtttgcctgcagcttccatacgcttgcgccaacgccatttcatcgccatcccgccgagcatacaggcctcggaagaaccaatggtgttggtgccaacggcctgaccatttttcggcgcaggcgcatgccacagatcggcaaccatatttacgcaacgcaggtcgatggctgcggattgcggatattcttctttgtcgatccagtttttattgatgctcaaatccatcaatttatggacgttttcgtcgtcccaggtctggcagaaagtggccaggttctgacgagcgttgccatcaagatataattcatcattgataatctgaaatgcgacatcatcgcgcatttcgtgcagcggaaatcgtttactctccgcgatagtagaaatggcctttgcgccaaaacgactatcgagtagttcactgcggaaatccgttaacagcttctggtccatttcgaactccttaaatttatttgaaggcaataaaaaagtaggatttatccgcaatggaagcaaggcattacaggcttaatttaaataacaaaatcctaagcagaaaaacgactttttataatataaacatttaacatgataatattaaaaacagactttattatcgtaataaaaatcgcccaaacattgctgttcgggcgatcaaattaattattgtttatcctgcatatacggcgtgtacaccccgttcagactgtgcaggaaagctacgatatcatccacatcctcctgcggcagctctttgcctacctgatagcgcagcatcagtttcaccgccccgtccagcgtcggcacgtcaccgcgatggaagtacggtgccgttaaagcaacgttacgtaaaccgggtactttctgacgcaatttatcacgctcttctttagtcacattcatacgaccaatatccgccgccgtaatttccccaaagttaaagtcttttttcagccccaacggttcaaaggaacgtccgccgagaataataccaccatgacaagttgcacatttattatctttaaataattgatagccttttttctgttgcgccgtcagcgcattttcatctccgcgcaaccatttatcaaatggggaatccggcgtaattaatgttttctcaaattcagcaatggcatcagtaatattttcgccactgaaaccttgcggatagacttcgaggaactgcgttttaagctgcggatctttttccagcttagcaataatttcgtcccaggatttgctcgccatttcaatcgggttcaacggcggtccaccagcctgatcctgcaatgttgccgcacgaccatcccagaactgctcaacgttaaatacactgttaaataccgtcggcgcgttaatcggcccaactgcgccaccaacaccaatgcttgtttttctgccatcgacgccccccgcattcaacgcatggcaatgagcgcaactaatggtgctatcagcgcttaaacggggatcgtgatacagcgcaaaacccaacgccactttttgcgcatcggtaggcagtttttgcgggatgggctgcaccggttcattgcgatgttccggagcagtatcattgctggcgtaatattccgcgcgctgttttgcaatccaggccagtatttccgcccgctcttcatcactcaccttacccgcccagtgtagcgcggtataacgcgttggtggcatagtttcatactgcatcacccattcaatcttattcaaatcgctttggctaacgggtttatcagccagcagtgccgcacgcacggcctcaaggttaaaagatttatatccaagcttaatgtcgtaatccatcaactgtttcgcgccaggaatataataataggcgggtaattctgcgctaggcgtgtggcaatagtcgcatcctttttcgcggagaaagcctaaaaccttattattttcactgacagcagatgcctgaacatcggcctgtttactgcgtttattatcgtggtaccacacataaccagataaccctaaatagcaaatcgcgacgccagccaggccgatcgcggtaatacgactgaccattttcattattcttccctcacggtggtgagttattgtgacccagaaaattttccagaatgctgcaaacgtctctgcgagacaaagccatcataaaaaacagggagatacgctttttgataggaatcaatcaattacatgaatataaactatcaataagatagcctgtgcctattacccagatcaggaatggcatatcatgattgcggcgagagcaggattgaatgttctgaaaatgaaaaacaacaccaaatcggtatttttataaattccattgatattagtgcgttatattttttgacaggttaataaacgtgatccaccgcacgctttgtcgcccaccaggcggagcgaatgactacccttaaagaaaagccgataattagcgacgaatttcggaggttggatccttatgctcaatcagaaaattcaaaaccctaatccagacgaactgatgatcgaagtcgatctctgctatgagctggacccgtatgaattaaaactggatgagatgatcgaggcagaaccggaacccgagatgattgaagggctgcctgcctctgatgcgctgacgcctgccgatcgctatctcgaactgttcgagcatgttcagagcgcgaaaattttccccgacagtaaaacctttcccgactgcgcacctaaaatggacccgctggatatcttaatccgctaccgtaaagtgcgccgtcatcgtgattttgacttgcgcaagtttgttgaaaaccacttctggctgccggaggtctactccagcgagtatgtaagcgacccgcaaaattccctgaaagagcatatcgaccagctgtggccggtgctaacccgcgaaccacaggatcacattccgtggtcttctctgctggcgctgccgcagagttatattgtcccgggcggccgttttagcgaaacctactattgggattcctatttcaccatgctggggctggcggaaagtggtcgggaagatttgctgaaatgcatggccgataacttcgcctggatgatcgaaaactacggtcacatccccaacggcaaccgcacctattatttgagccgcagccaaccaccggtttttgcgctgatggtggagttgtttgaagaagatggtgtacgcggtgcgcgccgctatctcgaccaccttaaaatggaatatgccttctggatggacggtgcagaaagcttaatccctaatcaggcctatcgccatgttgtgcggatgccggacggaagcctgctcaaccgttactgggacgatcgcgacacgccgcgtgacgaatcctggcttgaggacgttgaaaccgcgaaacattctggtcgcccgcccaacgaggtgtaccgcgatttacgcgcgggggcggcctccggttgggattactcttcccgttggctgcgtgatactggtcgtctggcgagcattcgtaccacccagttcatccccatcgatctgaatgccttcctgtttaaactggagagcgccatcgccaacatcagcgcgctgaaaggcgagaaagagacagaagcactgttccgccagaaagccagtgcccgtcgcgatgcggtaaaccgttacctctgggatgatgaaaacggcatctaccgcgattacgactggcgacgcgaacaactggcgctgttttccgctgccgccattgtgccactctatgtcggtatggcgaaccatgaacaggccgatcgtctggcaaacgccgtgcgcagtcggttactgacacctggcgggattctggcaagcgagtacgaaaccggtgaacagtgggataaacccaacggctgggcaccgttacaatggatggcgattcagggatttaaaatgtacggcgatgaccttctgggtgatgaaatcgcgcgaagctggctgaagacggtgaatcagttctatctggaacagcacaaactgatcgaaaaataccatattgccgatggtgttccccgcgaaggcggcggtggcgagtatccgttgcaggatgggtttggctggactaacggtgtggtacgccgtttaattggtttgtacggcgaaccataatatttttacagccagccgctaacttcctgctggctgtaaaattatcctcttcaggaggagatatttaacatcattgccgcctgggtgcgatttttcacttccagacggcgatacagggattccagatgcgcttttaccgttccggtactgatattcagcgctctgccgatctccttattactttcgcccgccgctaacatggttaaaatctcccgctggcgggcgcttaagcttttgagatctttaatgtccttttccggcgtcgtccgccagtctccaggcagaaacatcatccccatcgccgcactatttaccgccaacgcaaatgtctcgacggtactatcacgaggcacaatggccagcacattaaaatggataacttcctgtaaccaccgtttattgcaatccgtcgccgtaattaacaccttaacctcaggaaattgcaccacggttttttgcagcaaccagtagcaaaactcaccatcctgatcgccatcgagcataactaaggcttcagggtaactttccagcttttgccataactcgtctgcctgactggccccctgaatactcactcctggaatacgctgctgtaaactgattttcattccatgaataaatatactctgcctgtcaaacatgactatttgcataactgaatctccacctgaatacgttaaaaagacttaagtagtggaagggtattacccgcgagaaaaaataagaattcgccatttggcggtggccattctacagagatgacgtgtagaaaatagttaccgatataaatagttacagctaaacgcctgaaattacatgtcgagggcactatttaaaacaattttgaggatttccttatattggtggttagtacgcatgcaattaaaaatgaaattccgcgaccacaagccaaaataacaaacggcaaggagacaaaaataagcacaaatagccaacacgtcctctgttcactttaaagggaatcgctgaaaaatacgctctgtttaaggggattcacctttctcagaaagctattccgcccttttcctgctgagaaatcgccacattcggcatgacaacattgtgaaacccggcattagatgttagaaaaaacaataaacaatgcgatatgcgcgttactgtttcgctgtgaacaacaaagcgtcaaagaaatggataaaattcacgcaatgcagttgttcatcaaagtcgcggagctggaaagtttttcccgcgcagcggatttctttgctttgccaaagggaagtgttagccgccagatacaggcactggaacatcaacttggcacccagcttctccagcgcaccacgcgacgggtcaaactcacgccagaaggcatgacctattatcaacgagcaaaagatgtgttgagtaatctcagcgaactggacggtctgtttcaacaggatgccaccagtatcagcggtaaattacgcatcgacatcccgccaggaatcgcgaaaagcctgttactgccgcgcctgagcgaatttctctatctgcatccgggaattgagctggaactgagtagccatgaccgtccggtagatattcttcatgatggttttgattgcgtgatacgcactggcgcgttaccggaagatggcgttatcgcccgtcccctcggcaaactgaccatggtcaactgtgccagtccgcactatctgacgcgctttggttatccgcaaagccccgatgatctgactagtcacgcaatagtgcgttatacaccgcacctgggtgtacatccgttaggttttgaggttgccagcgttaatggcgtccagtggtttaagtctggcggcatgttgacggtaaacagtagcgaaaactatctcaccgccggtcttgccggtctggggattattcagatcccgcgcattgccgtgcgcgaagccctgcgtgccgggcggcttattgaagtattacctggctaccgtgccgagccgctctcccttagcctggtttatccgcagcgtcgggagctttcccggcgtgtaaacctgtttatgcagtggctggctggcgtaatgaaagagtacctggactgaccgactatactttttaagaatgaccacgacagaaggacaaaagagcggatgacgcaggaaaacgagatcaagcgtcccatccaggatctggagcacgagccgattaagccgttggataatagcgagaaaggcagcaaagttagccaggcgctggaaaccgtcaccaccactgccgaaaaagtccaacgccaaccggttattgcgcacctgattcgcgcgacagaacgctttaacgatcggctgggtaaccagtttggtgcggctatcacctatttcagttttttgagcatgataccaattttgatggtgagctttgccgcagggggctttgtgctggcctcccatccgatgttgctacaggatatcttcgacaaaattctgcaaaacatcagcgatccgacgctagccgccacgttgaaaaacaccatcaacaccgccgttcagcagcgtacgactgtagggcttgtcggcctggcggtggcactttattccggcatcaactggatgggtaacctgcgtgaagcgattcgtgcccagagccgcgatgtctgggaacgcagcccgcaagatcaggagaagttctgggtaaaatatctgcgagattttattagcctgattggtttgttgattgcgctgattgtgacgcttagcatcaccagcgttgccggtagcgcgcagcaaatgattattagcgccctgcacctgaacagcattgagtggctgaaaccgacgtggcgattgattggcctggcgatttccatcttcgccaactatctgcttttcttctggatcttctggcggttgccgcgccaccgtccgcgcaaaaaagccctgattcgcggaacatttctggctgctattggttttgaagtgattaaaatcgtgatgacctacaccctgccaagcttgatgaaatccccctctggcgcagcatttggttccgtgctggggctgatggcatttttctacttcttcgcccgtttgacgctgttttgcgcggcgtggattgccaccgccgaatataaagacgacccgcgaatgccggggaaaacgcagccttaaaataggccggatgcggcgtaaacgccttatccggcatacgattttattcggcctggctccccgtaggccggataagatgcgccagcatcgcatccggctataatgcgcacataacctcttgaaactcgtccccagagcctcttcagccatctatttgggagcaaacaatttcattccaactcataaccccagcatataaatccagttggtaacttttatttaacctgaaaccagttttatccactatttataaaattatgtgaagcatttcatagaagaaaaatcactggcctaaacattatcccctttttgcctgatttttgaccatttccgcgatttgttacacattgaaatatcacttttgctgtgcgtaatatggctattcgttagccaaaaaataagaaaagattatgcaagcaacagccacaacactcgaccacgagcaagaatacacgccgatcaacagccgtaataaagtccttgtcgcctctctcattggcacagccattgagttcttcgacttttacatttacgccactgcggccgttattgtgtttccgcatatcttcttcccgcagggcgatcctacggcagcaacgctacagagcctcgccaccttcgccatcgccttcgtcgcgcgccccattggctctgccgtttttggtcattttggcgatcgcgttgggcgtaaagcgacgctggtcgccagcttgctaacgatggggattagcaccgtggtgattggtctgctgccgggctatgccacgattggtattttcgccccgctgctgctggcgctggctcgatttggtcagggtctgggcttaggcggtgaatggggcggcgcggcgctgctggcgactgaaaacgccccaccgcgcaaacgtgcactgtatggctcctttccgcagctgggcgcaccgattggcttcttctttgccaatggcactttcttgctgctttcctggctactgaccgacgagcagtttatgagctggggctggcgtgtgccatttatcttcagcgcggtgctggtcattatcggcctgtatgttcgcgtgagcctgcatgagagcccggtgtttgagaaagtcgctaaagcgaaaaaacaggtgaagatcccgctgggtacgctgctgaccaaacatgttcgcgtaaccgtactgggtacgttcattatgctggcaacctatacgctgttttacatcatgacggtctactctatgacctttagtaccgccgccgcgccagttgggcttggcctgccgcgtaacgaagtgttgtggatgttgatgatggcagttattggttttggcgtgatggtgccagtcgctggattactggctgatgcctttggtcgccgtaaaagcatggtaatcatcaccacgctgatcatcctgttcgcgctgttcgcctttaacccactgctcggttctggcaacccgattctggtttttgccttcctgctgctggggttaagtctgatgggtctgaccttcgggccaatgggtgcgctgttaccagagctgtttccgacagaagtgcgttacaccggagcaagcttctcttacaacgtagcgagcattctcggggcttccgttgcgccatatatcgcagcctggttgcagactaactacgggctaggtgcggtggggttatatctggcggcgatggctggcttgacgttaatcgccctgctgctgacccatgagacgcgacatcagagcttgtaataagagtgaaaagcctgatgcgctacgcttatcaggcctgaatttccatacaatatattgaattcgcaaggatttgtaggccggataaggcgttcacgccgcatccggcatgaacaaagcacactttgccaacaatctaaatctgtttaattgccggatgtcagacatccggcaattatcatcacttcttcatctggctcaaaatcgtccgacactgattagcctccccttcggaaggactgatcagtgccagtaacgccgccgccggtgttaccagcgttgccagtgccgcagcaacagcaccacgggcaatcagcggtccggctttcaccccagcctgcggatttttaaacgtcccccgcacatacagcgggctacgcagtgtgataatccgaattcctttactctccggatcaatagtcaaatccagctgttcgctagcaaaacttgccgtgccggtaacattaatcaacgcgttctcagtatcgaaagcaaaaatctgcgggcgcgccacgccgttggcaatattcagattcgccgccgcgcagttcacccgcacctcatcatcaccaaatatcgcaccgacaatgtagttgccgacattcagcccaacaatctccatcaggttgcggctcaccagcccgtcattcatcaacagtttcaggttgccgttactgttgcctaaaagtgccgccacgctgttaccgctaccgcgtagttccgcgtcaccgttcatttcccccagcgtcttctgcatcagttccacatcgggcatcagttctttcagtttcagtcgacgagcctgaatatctgcccgcccctgcatcggctttttatcgccttccagatgaatattcgccgcaatgctgccgcccgccatgccaaatttcagcggttgcaggcgcaggtcagcatttttgaggatgatatgagtagaaagatcgctaatcggcaggctactgccatgctcaatgcgccgccctttgaagcgaacatcggcatccataacgtcccatttatcggtttcgaagcggtcataaggcagcactttgcccgcaggctgaacgcttttttcgcccttcttctgttcagaccgtttgctcttttctgcccctttcccggaatcaacgccaatcaacggtcccaggtccgccagccgcaattgccggctctcgacatcaccttccagttttggtcgtggctttccggtggtgtagaccagagaaccgtggatatcgctatcaccaattcgcccattaaaaccgcgataatcaaagacgctgcttttttcagtgtcgattttcgctaccagccgaccatccgtttcaaacggcggggtatcgggcagcagaacgcccgtcagttcatagagatcacccagactatcgccagaaaatttaagccgtaaatcgacaccgcccatcttcattgggtcattcacgacgccatcaaaagcaacacgggtgttaccagagcggaaatcagcctgtaccggaaacggcgtcccttcgccacgcagcgccagcataccgcctatttttcccgtacccgtgagcggttcaccgttatatcgtccctgcgccttcaggccaaaaacgtaatcgcccaccttttctttatccgctttacctttgcttccagtaacttcgctgaacggcagcggcttgcctaagggatcaacaaaaatctccagatccgctttgcttactttgtcatcaatggcgatccgcccttgatcgaaaagaatattatccagccgaaagctccatgcgctcggctttgcattcgcgtctttgttatcatcgttggcaagattaaacgtccagttattgttcttttcagagaggcgaatcaggcgcgcgtcgggcttttcgagcttgatccacggcagccagaccgttttggtcagcagcgccagcggggccagcgttgcctctacgcgtggcaaatgcaccatcgtgacttcgggaatatccggtggattgccaagaatgatgtcttccgcgtgtacatggggccacggcacccagctgcgccagccagtttcttgtttttgccgctcccacaccacgcccagatcgccacggatagcgaacggacgattcaactccgcagagactttctggttgatagtcggtttgagtcgattccagtcaaaagttgcaatcaaaatgatcgccacgacaatcaacaacaagaaagccccactaatcgcagcggttattttgcctgccttgctcatcgttcgcttcctcatattcttcctgtgccagtcctaaagatagtccagccaggcggaaaatgaggcagcttatagcgccagaaccgccgtattcagcgtttctatcggtgccgggcgactaagaaaccagccttgtgcggcgaatgcggggctgttctgaacatcacgccactcttccggcgtttctacgccctcgacaatcaccccgcgacaatagcgattcattagatgtaaaagctgagaaaagagtgtgcgtccttccgggctctgacgcagcatcacaaacagttctcgcgcgattttgatgtagtcataacgcacttcacttagcgcagagaaatttgccatcccggtaccaaaatcatccagccacagcgggccaaattcacacatgctggcaaaggtactatctttcggcagacggatatgctccaccagttcgaaacgcagccagggaagacgctcaatctggcgcaggatttttggttgctgacgcagggcgatgagcgtagggccatcaatattgacgcttgccagcaggccgtgctctataaagaagtcggctttttgcgccagcaaatcaatctgctctttcacaacctccatccgatggctgacggtgatttcagtaaaatagcgatccggcggcaggcgttggctagggttcaagggatgcgtgaccaccgttaatagctccacggccattaaccgcccgcatgtttgatagatcggctgccaggtgtaagcacgctcacactgcaaccaaaaacgccgttcctgcaagctctcgatgcttgcttcagggttgcttattcgctggataacctgccttatcatcaaagatgtcctgtgtttaaaagtgatgctgcccggactcgacaaagattatcggcgcgtaagggcagaactttaccgcctggccggggtaaatttcctcactccacaacggaatctttcaggaatacgttctggctcaaaaaaataatggaacactgttttaatatggttgaccagcaaaccaccacagcgcaaactaacgctaattttttacagatcaggttcacgactatgtccaaaaagattgccgtgattggcgaatgcatgattgagctttccgagaaaggcgcggacgttaagcgcggtttcggcggcgataccctgaacacttccgtctatatcgcccgtcaggtcgatcctgcggcattaaccgttcattacgtaacggcgctgggaacggacagttttagccagcagatgctggacgcctggcacggcgagaacgttgatacttccctgacccaacggatggaaaaccgtctgccgggcctttactacattgaaaccgacagcaccggcgagcgtacgttctactactggcggaacgaagccgccgccaaattctggctggagagtgagcagtctgcggcgatttgcgaagagctggcgaatttcgattatctctacctgagcgggattagcctggcgatcttaagcccgaccagccgcgaaaagctgctttccctgctgcgcgaatgccgcgccaacggcggaaaagtgattttcgacaataactatcgtccgcgcctgtgggccagcaaagaagagacacagcaggtgtaccaacaaatgctggaatgcacggatatcgccttcctgacgctggacgacgaagacgcgctgtggggtcaacagccggtggaagacgtcattgcgcgcacccataacgcgggcgtgaaagaagtggtggtgaaacgcggggcggattcttgcctggtgtccattgctggcgaagggttagtggatgttccggcggtgaaactgccgaaagaaaaagtgatcgataccaccgcagctggcgactctttcagtgccggttatctggcggtacgtctgacaggcggcagcgcggaagccgcggcgaaacgtgggcacctgaccgcaagtaccgttattcagtatcgcggcgcgattatcccgcgtgaggcgatgccagcgtaaacgcagcatatgcaaaaggctggataaagtgttacccctctatccagctcatccataaatacctgatggttgtgctaactcatcaccatcaggcattactgtgcaggtggaatatccgtcacttcaggatgtacgtcatccgtggcgacagaggtggtcgcagcggcggtagatggggccatgatttgatcccagaccgcctgcaacgctttcatgttaaattccggctcgcctttcggctgcagcagtattaacgccatatcattgctcaactgttgacgcagatcctgatttaacatctctaccgtcaggctattaaggaaatcctgccgcagtttctgatattgctccggcgcgatatcgacaacctgattttgcaagctacgcatccgctgacccatcagaatatcggtatcagctcgtgcataggcggcaaacagtttctgcagctccagtttcttttgcgccactaacgcattgaactcttcttccggcagacctttatcgcgaaccttcgccagttcacgcgccaccagattaaggttgctgttcagcttgtcgtttggactttcgatgttgatggcacactgcgcacgcagatacagcacacggcagtcaaatccaagaccgatgtctttgctgttactggcacttaacgcttgctgaacatgccagaacagcgcctcgcgggccaggtccgcacgccagtagcgcagcagtgcggcactttcacgaatcggctgccacggcgtatcccacatgatagataaccggtcctgacgcaccgcgtcagtcataatactcaccgcttccgcacgcagcggagaaagcgtcggcaccggagctggcgtttcacgtttgcctttcagttcgccaaacgttttgtttatttggtcgacaacgctgcgcgcatccacgtttcccaccaccagtagcgtcattgcatccggggtgtaccatttctgatagaaatctttaattttttccgcttcaacgggttgtttcagcggatcggcaggatcgtgacctaacaaggtactccctttcagacgatagcgccaccagccctctttagtatcggcaggccaggttgccaccatgtcctgactttgcagcgcgtggttgatggtttctggtgtgatggtcaatttgccagtggcatttgccagataagagagcgcttctttcagcaaatcgttacggttattgggcaaactcagattaaacagcgtggtgtcataagagacaattaccggcggcatcgggcgtttagggtcgatcccctgctgccacaaactacgcgcctgtgctgcgtcaaggccaccgctttgcgttagcgcaatacgagggatggcgtgactgtaaccgctctgttgtgtactttcggcgaggctaccggtattaaccagcaggcgaatttcaacacgatcgctgggacgctggggggtggtcagcacttgccactgtaaaccgttggaaagcgtcccctgttgccatgctggatcaggctggagcgcatctgcctgcacatagccagcagtggccatcatcagcaaaccgcccgctaaaagtcgaatttttgtgccctgcatgtgaacccctgatcaactatcctggtaataaaaaaactgcccgttgtcggtcagtctaaatgacgttaaaaacacttcgtgttagaccgcaagaacatgaaaatgtcacggaagaagtgaaataaacctgaactcacccaggtggtaagttcaggcacaggggtcaattatgcgcaaacacccgcactcggggaagggagtgcgggcataagtgatgagattaagaggataattcgtgcgttttgccatccggcgcacgattattcagcacatcgtccagttttttgtggtccagttctttcacccacttagcaacgacaatggtcgctacgccgttaccgaccaggttagtcagcgcacgagcttcactcataaagcggtcgataccgaggatcagcgccagacccgctaccggcaaatggcccaccgcagagagcgtcgccgccagcacgataaagccactacccgttacccctgccgcccctttagaagaaagcagcaacacgattaacagcgtgatttggtggacgatatccatctgactgttagtggcctgggcgataaacaccgccgccattgtcaggtatatgcttgtgccatcaaggttaaagctgtagcctgtcgggatgaccagccccaccacgcttttacggcagccgagtttctccatcttgtcgagcatacgcggcagcgcgctctcggaagaactagtccccagtacaatcagcagttcttcacggatgtagcggataaatttgaagatactgaaaccagtcgctttagcgatactacccaataccagcaccacaaacaggatacaggtaatgtagaaacagataatcagctgccccagttgcaccagtgtgccgacgccgtatttaccgatggtaaacgccattgccccgaacgcaccaataggtgccagacgcatgatcatattgatgatgccgaagatgacctggctgaaactttcgatgacgttaaaaatcagttggcctttgctgcccagacggtggagcgcaaaaccaaacagtacggcaaacagcagcacctgcagaatgttaccgctggcaaatgcgccaatgacgctcgccgggatgacatccataatgaaggcgacaatgccctggtctttcgcctgatcggcgtaaaccgctaccgctttcgcatcaagcgttgccggatcgacgttcattccggcaccaggctgcacgacgttaacgatgataagaccaataatcagcgcgatggtactgacaatttcaaagtaaagcagtgcgactgcgccggtacgaccgaccgccttcatgctttccatgcccgcaatgcccgttacgacggtacaaaagatgacaggagcgatgatcatcttaatgagcttaacgaagccgtcgccaagcggtttcatttgctcgcctatttcaggatagaaatggccaaggagaataccaatggctatcgctgtcaggacctgaaagtaaaggcttttaaacagagaggttttcatagggtgtcctttagtaaaaccacaggtcttgtaaggttatggggtacctgcggccttaaaataacacccagacaacatcacagaaatgtacctggatcataattgaaacaaaaaggttaaaaagtttgagctggctcgcacaaaccagcactttttaaagttttgtaatcagtttggggtagttacttttcttccaggtaactctcttcgaagatttcaatagggagtgggcgagcaaaaaggaagccctgggcaataccaacgcccgcttttgccagccagtcgcgttgtgcttcagtctccacgccttcggcaatcatttgtaagttcaggctctgcgccagcatgataattgcagcaatcatgctgctatctcccggcaagccttcaacaaacattttgtcgattttcagtacgtcgattggcaagcttttcatatgctgcagctgacgcagccctgcgtagcccatgccgaaatcatccagcgccacccgaactccggcattgcgcagcggacggaggattgccaccgcagcatgagggtcgtcaatacgtcggctttctgtcacttccagaatcagtgttcccggctgaatgcgatagcgggttaacagttccagcatatccgccaccatattcgggtgcatcagttgcagcgcagagaggtttacgctcaagggcagcataatgccgcgctcttgccaggctgcaagcaatcgacaggactcttccagcacccagtgaccgacggtaaccatcagcccacagcactcaatgcgatcgattaagccatccggcaggtcccaactgccatccggttactggatacgcagtaacacttccgcactgaccagtttaccgctggtcatctcgacctgtggctgtaaccaaatagcaaactgatgattttccagtgcattaaggatatcgctctcttccgtcaaccgcttctgggcggcttccatctgctgcggatcaaagaactgaatctgattcttgcctttatggcgagcggtaaatgccgcagaaatagcgcgactgtaaagctgttcggcggtgagatcgccgtagaacatcgccacgccaatgctacagtgcggacggagttgaatacgttcaatcggcaggcgctcgctcatgatagtgagcacttgctgacctaaggtgattgcgtgccacggttcctgtacaccgttggcaatgacagcaaagtcataaccgctaatctgcgcgaggatcatacgtgggctcagtacgcttttgagtttttccaccagcgtcagcagcagaatttctcgttgcgcctctttcagcacgcccgcagtatcacgcagggtttcacaggtgatgatcatcagcgcggtggtttgtttacgcgcgacaacctgctccagcatctccatcagcaaggctttgttcggcaaatcgctcaccgggaagcgcatcgcattttcgttctgttcttcataatggcgctgcagcaattgctggttgaggttgtaactgcgcaccaacataccgatttcatcgtcctgatgcagacgcggtaatgccagttggtgaccaacaagctccttggctgggatggcgttaagttcgcgagcaatattgcgtaacggatgcaaaatcaggcggttaatgcaccagctgatggcgacggtcaggataaggctcaaaagtaagtaaatggtcactaacgtactgagggtgctcatcacgaacttatacatacggaaggaatccgcctgtagtaccagataggcaattggctgcgggtttgccggacgttcgaggctgtaaacgcccaggctgatttgaaccggtagctcaaacaggcgagtaaccattaccggcaccgggcgctctggaataaaacttttacgcagcgcctggaactggttaggcagcactacatcggcacggctgaccacgcctgccggtttaatgctggcaagaatagcttccgcttcgggaatatcgcctttcaaaatagcactagataagggttcgcggacagagcgagcaatgctttccagttgcgtagccgtgttatagcgattctgctggaccagatggaacagcaaaacggtgcaaaaaataaaaacgaacaccaggacaacggctgccaccattgccatctgcttgattgttaacgagcgacttacgcgcaaattgtctccccccggaaatcccagattgccgcccgagtatacccgatcgcagcggcattaagagaggcgctatctgaaaacttaccagtcggcgtaaggtatcagcggctgcggcggtaaatccatgtcaccctgccatccggcggcggaataacgtacgtagagcaggaaatggctgggtgcgtaatctttcgcctgctggatatcaattgccgtgccaacaaaccagttggaagtaacacgtcgttcaagtaatgcccgcgccgtgtagccgaagccctgactgctgccgccatcgttggattgccgcgcagcttcttcctgccagtcggtcgggatcagattcatcagcggataacgcggcatggttttggtgcgactatggctccagctgccagacgcacccagctcccagctccagttttccgtgcgctcccgccacatcaccggtatggcaaagctcaggtattcctgcggactgtagtaaccgccctgaccgagactgtagccactcagatctttgtcgtaatgccagatcatgttgttcaggccgattgtgacgcggcgattgttctggttaatgaccttatagtaatagcccgtcatccagcgcacgcgccagttatcttcgacatttttaccggttaactggtcgccactaaggcttgcccagacgccgtttgcttcacctttatcgtagctcagacttagccccacaccgtcggcacgtacgccaccccattttttcccggtattgctcggggagtctttttgcccaccaaaggccagcaaagaactggagatgggccgacggtgggcgttaacggtgtaacccagcggcccgatatcatcgctgtaactgatgccgccgaccacatccaccacgttgaagcccatcggcgtggtaccgatatcccagctccagacgtcatttcgccagccgaccgccacgctggcaccggaatcgctctggctgcggttgccgctacagtcctgtaatgtacaggtgccccagttgtcatcccatttgccatcggcattagtggagaaactgccgacgttcatattgacgaaatcactgcgaaagaacatccgcccgtcagaatacggcgcatccacctgcaacatggtagtgtgcgctttcagatcggagtaaccaccggtgccgctgctaccccagtaatcgtgctcaagggtgacgttaagatcctgctggcgatagaggtccgccgcatcgctgcgcacgccacgtttcagccagtcatctttctcgtcgttacgggtcagtcgggtaaaggtgtcgttatcctgcggacgcgtcgtagtcacaccggatgcgaccatggcgtctttgtaggtttccagcgcctgcgttggatcgcccgcctgcgcttcaaacttcgcaccatcacgcagcaccatcgcgctttccatgctcggtggctgagattttgcctgcgggatcaacttattaaacgtccgctgcgctgctgcggtatcgccaagctgcgcctgtgccagcgccacgcgccgctgtgtgttcaggctggcgttatcggtagcgggcagtttcgccagctggctacgtgccgccgctttgtcaccggcagcaatatccacttccgtcagaccaagaatggcgtcggcgttagctggctcccgcgtcaggacattctgatatgcagcgcgggcggcggtgtaatcacgtcgttgttgcgcccagtcagccagcgtgaggtcaatacgcgtggaaggtggttgctggcgcagcatcgcttccgcttctgcctctttgccgctttctcgcaggcggttagcggtttccagcacctgatcgctttgcagtcgattaaccagctcctgaatattgctgttccactgcgcacgcggcaggctattgatatgcgccagcgccgctctgtcctggtcatgaccagagaggtacagcccgtaagcgtaaacctgctccgggtcgttgctcttctgctgcgccagattgcgcattaacgtatcggcctggctgcgttgtccggcctgccagagatcctggctaagtcggtaagtaatccatacgctgccggggtccagcgccagtcgttgccgctgaagtgctgccgcctgcgcccatttgccctggttttccagtgcctctgcctgctgtgccagacggtcgttttgcaggctgcgttcgatatcatcaatgctacgccgctgactggcagagaggctggcgataaacgcttcagctttttctgggctttgctggcggtaaatatttgccagcccgcgcacggcgttagtgttgccgctgtccatacgcaaggtctgctgataataacgttcggcggcgggataatcttttcgcgccatcgccacatcgcccagccccagcactgcataactgtcggtgttatcgacattacgcgcctgctggaacaggcgttctgcccggtcaggattattggctttcagcgcagcatcgccctgctggatcgccagccagtagcggtttactttcagcagactgttccatttgtcgttgttgctgctgtgcgggtccagtgcgagggctttttccagattcgccactgcattggcgcgatcgcctttctgagaatacgcctggcccagcgcccccagagcttcactgtctttcgggttcgcccgcaccgcctgttgtagttcgggaatggctttacccgccataccagagtccaccgccgctaaaccttgcgcacgagcgcggaaagcaggatcggccagctgtttttgctgttctgccagttggctttgcgcagccgccacgctatcgccatcactaaagatgctgagatattttttcagcgcgctcacactggcatcactgacgggcatgtctttaatctgcccgtaccagattttagaggccccttcgcgcccggcgttgctttttgccatctgttccaggacggcaaaaccttcgtcacggcgatcgctactaaacagcaatagcgccagattgttttgcaggcccgtattgcccggtgcatccgcattgatgcgttttaactgattaatcgcttcgccacggcgagccggaattttcgccaccgtactccagtactcgacagcaatgtcaccttccggcggcgcaccgttgaacagtttgttgtaactcgccacagcttcttctgcatgaccggtcgtcgcctgcaatcgtgcctgttgcagtgcctgacgaccatccggcgtggaaagtagcatcgtagtccggctgcttttatacgcattactactcggcgctaactggctcagccgatcgagctgtttttgcgcgccatcaatatcgccctgacgtaacaaagaacggaaacgggcggcaacgacgtccgggttattcggatcaataagttccagccgatataagctctgttgcaccagatcttcacgatgggtcgcttcgcctaaccgaacttgctccagcaactgttgctgagcggttggtgctgcctcgaccatcggcatgacggccagaccgagggaaagcgtgaatatgtttagtgtgaatttgcgcattcctggccccagtcaggtaattactttagtgactatttgcgcattcctggccccagtcaggtaataactcaccttttgtgctgaagcggaaacggtgttgatcccagccttgtccaaacagggtcagcacatagttgtaataggcatcgctgccgggaaagttatcggccacgcgctggcgctgaacggcctgcgcatcgcggttttgtaaaaagggcagcatggcggcagaaaaaccgactggtcctttaccctgcgctttccccgtagccacatccactttttccggcggataaccgtttttctcagtgaatgtcgccatcggtttaaaccggttgagcatccgcgctttttgcggatcgctgtcaggcatcatgcctacccacatgtaaacgcggatagcgtcgtagctgctgatcaatgttttttcggcttttagctgccagcctttgtctttctcatagcgcacccagtctgggctaaaacctttcggggcggtttccagcaataaacgttgattggtttcgcgcagcgtggtccacggcgcgccaaagcgggtgaaatactgcgccagcgtcggcggcaggtagctggggttaaaacgccagctgttatcctcagcaaaacccactttgcccggtaacaacatggaacccagcccaggcaccgtcaccacttcctcccgcgcgatacgttttagcaacgcgctgccgatgtcggtataacgctgctctttccacaaacgccccgcctccagcaagctccaggccatccagacatcaccatcggaggcgctattgctgtccagcacttcccacttactgttctctttcttgccccacagccaggcgggcaaacgttcttttaaagaaccctgagcgagattgttctgcgtccagtcgagaatattatcgaaagctgcacggtcgttagccgccagggcagagaacatgccgtaactttgcccttcggaggtggtgattttgcgcgcgtcgctggggtcgatgacgcgcccttcctgactgatgtaatcctttttaaactgctcccaggcaggccaggtacaggctgcctgaacactaaaggcagccagcagcagcatcgtcacgattccactacgcaacacattcatcttcaattactcgttatccgggttaagacgacgacgactaataattcgcagcagacgccacagtacccatgccagcaatatcacactgatagccgccagcaccgccagcagaatcggatggtttgccagcgcataccacacgcgctcgaaccacggcagatgacctacgtaataaacgtcgccaacacgtaggctgttgataccggactcgcggatcaccgcgacgctaccgaacatggtggcgcgtttgccgctatcgttcaccgcatcgttaagcatttcataaccgcgtgggctatctgccaacagcgcaatcacgctgcgctggtcgttatacgggctctggaagccaatcaccgccgccatcgcaccggaagaggtcagcgtactccgggtttctgccgcgcgatcgctctcgtccggcacaatgccggggaacggggtctggcgcatcggtgttttcacccagctttcggtcgcctgcaccaataggtcgatctgcttatcgtctttcagtttgtccgggataccaccgatgatcatgatgtcggcatctttgccctgaatggtgctgccatcatcggtcaccgtcagattaatcgccgggaagcccgtctgtgcgccgataaaaccaacagtattcagcaacgtttccatctgtgcttcgttaggcgctttcggcatcacggtgatggtttggctcagatccgccatccggctgaatgggaagcccgcgttagcaaaggcgcgtagatccggcatcgggatgaagtggtaatacttgctgaagtcgatggtggagtcgtcaccaatcaccacatgattctgcaccggctggaaggtaatacagttatccacgctaccgcccggcatcgggttcatatactcaaagtcgaagcgcagctggttggtcgcgcccagtttcagcgccggaatagagacatctgttttgccatccagcaaaccttgtaataccggaatccgcagcagcaggcggttcgcctcctgtttgctgctcaggttgaaggattgcaggaactggttattcaggctgatatccatccggctactgtctttcaccggcggcatggtgtagcggtaattaatatccatatcaatgccggtactgcgcatcaggtagagatccggcggcaggtttaggctaacgttaatcgctgctggctcaagaccgctggattgtaactgttcttcataggttttcagttcgccaaatgtgaccggacgatcggtacgtacccagttcggcgcatcgtacggcttacgcggtagcagcggtttcacttcattcactaccacgctttcaccacggaacagaatgttaccctgagcgatacctttcgctgcctgcaacaggtctttgtcgtcacgaccaaacaccaccagcagtttgacgtaaggattctgcggatggttaatcatctcaatcaccggggcttttaccgccggatgatcgcgcaggaagtccggccgtttgtcgttggttgcaaagacaatggcattgcgatccggcagttggttatagagtaccgggaagttctgcccacgccagccagaacggctaccaaaccagctggcgacaatggcagaggcttgttgcagcccaacatccggcgcacccgcaaagaccatcggcaaggtgttggtgcggttatcgctcgggtcaaagaatggcaccgggaagtgactcaggtcattcttcacattcagggtctgataggtcagatccagtccactgctccgcccaacatccagccaaagcgtggtgctggccggtttttcgcacacgtcctgataatggccgacaaactccagccgtacacggttgaagtcgctaataaacagtgggttaatgggcatttgcgccagcgtttttttacccaactgttctttggtcactggcagcacgcccatcagttcatcattgagataaacctttaactggctctggacaggcagtaagcttgggcttggggtgtattcgaagttgagcatcgccttcgtcaccacttcatcgctgcgcataccaaactcaatgctgccgttcgggttaatgccacgtagcaccatgctgcccggcggcggtgcaatttgcgcaaaggtcagcttcacatcacggctaggaccgttctgcgccacgactggcgcatcagcgccctgcacgcccggcatcacttgccccacctgcggattttgttccgtctgggcggctacagctggctcagcattgatcagtggttgcgttgctggcgtcgcctgcgtcatgaaagaggggaacgcactcatccccatagccactgcacaaatccagaatagttttcttttcatcgcgttatcatcattgttgagccaaagcctgatcgcttggttgtgccgtttcgctccgctccgggcggcgcggaataaagcttacaacccaggaaaccagagaagtcagcacacggaatatgcccttcacgctagaaggcgcaaactccgccagatggcggtagccacggaagccgagcttcagaatatccagcagactttccagcggcttatcttccgggtagctgtcctgccagagcgcccatgtatccgcacgggcaaacgtacactgcacaaaatcgatatgttgctgggtggtgagcggcattaatttcagcccaacttcattacccatcacgcgcgccacctgggtcgggaagacgtattcctgctgaccgcgtttaagcaacagattcactttctgcccttccagaatctgcgcctgaccgttgatcttgatccccaaaccaccgtcggagaaatcctgaacggtacagctgaagaggtgaccatcttcgcgggcaattgccgcgggcatcgtcatctccacgcggtggcttcggcgtacctgtttgctttctacgcttaccgcaactgcgccgccaagaacaatcaggttgtagaacacccacaccatactgacgaccacggtgagcatctcggttggcgggccatagaagtagcgccagatgcctaccgcaacgcccaccaggttgagcaggacaaggaagatgtagggccggctgatcacccagtcgacgtactcttcttccaccagtccacctttggcggtgacgttaaatttgcctttgtgcgggttaatcagcgccaccagcgtcggtggtgcgatataccacgccagcaccgtttcgtagatttcactccagaaagagtggcgatatttgccctggatcttggagttggtcaggctggcatggatcatatgcggcagcacgaatagggcgatcatcaacgctggcgcatagatgatgtaggcatgaagcagcaggaacgccagcggcgcagtcaggaagatcagccgtggaatgccgctcaagaagtggaacatggcgttgacgtaacatagccgctgagcaaacttcagccctttaccggtgagcgggttatcgagacggaagatttgtaccatcccgcgcgcccagcgaatacgctgaccgatatgcgcgctcagactttcggtcgccagccccgccgcctgcggaatacgcatatacgcggaggtatagccacgacggtgcaaccgcagagaagtatgcgcatcttcagtcacggtttcgacagcaatgccgccaatttcatccagcggcttacgacgaatcaccgcacaggaaccgcagaagaaagtggcgtcccacatatcgttgccatcctgcaccagaccatagaacagcgtgccttcgttcggcgttttacggaaacgccccaggttgcgttcaaacgggtccggactgaagaagtggtgcggcgtctgcatcatcgccagctgtttttctttcaggaaccagcccatggtcatttgcaagaagcttcgcgttggtacgtggtcgcagtcgaaaatgctcacgaactcgcctttggcatatttcagcgcattgttgatgttgcctgctttcgcatgttcatgagtggtgcgggcgatatatttcacccccacgttttgcgcaaactggcgaaactcttccctgccgccgtcatcaaggatccagatattcagcttatctttcggccagtcgatacccaggctggcgtaaatggtatttttcaccacgttgagatcttcgttgtaagtcgggacaaagatatccacgctcggccacaggctcatatctttcggcaatggcaccggctgacgattcagcggccatactacctggaagtagccgagcaccagcacaatccacgcgtacgtttcagcgaagagcagaataagcccgcacaccaggctgaccggatcgtcccagttcagcgtagaggtgtaacgccaccagatataacggcaagaaacggtcaggctcagcacaatcaacattagcgcgctgaagcgccccggcatccgccgtacgatcagcgctaccccccacagcagcatcaggaagataaactgcgccagcgggttaaacggctgagtaacgcagattaacgccagaatcaggctgaaggtgacgatgataccgaggatcaaccgccgcgccccggcactcaaatgaccgagctcttttttctcatccagatgctgtgttttatggctaacgcgctcaggcagctcgttcatccattgatggtaacgtccacgaatattttgcagaccactaaatgcccgcctgcgcggtttcggcgtttctttgcggcttgcaccgatcaataaccagcatgtttgaatgagataacggaccgggtccagcggacgcggacggctggcgttgatatgcggatacaggtttttatgttctgcgcgaatacgctgccagcgcgggtgctccagcggaataaaaatccaggccaggatcatccagaaacagccgagcgtcgcgctgaaagcgctcgcaccgtgacgacgataatcgcgataacgcccgataagccgcgcgttgaccggcgggataagcaaccaccgggtcaggatactcatgatgcactcccgactggcgtttacatcaacttgcactcccgactggcgttttcagcccggagtagttcaacaggcaccagttcgccagcgtcagtatctcttcagccgccagcgcatcactgcgatattcacctactggttgcttagccgccaggcattcagccatcgcttcatcacgatgaatgagcatcggcagtaatcggcgctggctttgcaaccaaagctggtaaatatcgtcctgaacctgactgccaatacggaagtcattaatcaaaatatgtgcgccatccggcagcgcttgctgatgcagtcggatatggcagttggcatccacattgacgattgccaggctgtgatcgcacaaactcagcagctggtgggttatctggctggcatcacgcggtaagtcgattaaaatccactggtaacgcccgctggcttttagttgctgtaagccggagcaaatatcgctcagccgggtttgccagtgctgtggattttcttgttcttcaatggataactgaccaaaaggcagcaaatcgagctggctggtgtagcgcaacccagcgtcacgccagtcctggccatccagcatcgctctggcccagccctgacggtgggtaaaatcaacattaaaactcaggcgcaacaagttgtccgggcaggcatcgaccaccaggacattttctcccaacatttgtaaactccaggctaatgcggcggtgatggttgttgtccccacgcctccccgcaccccctgctatcccagtacggccattcaccaatcccttacttttgttgcgcaaactctgccagcaacggccagcgttttaatgccgcggccaactgttcgcgttgggaaatatcggcataatcaatatcaggcagactaaatgcctgctttaacgccacaatatcattctggaagatatagcctatcgcgggatcaggcagagtatctggttcattgttattcattttgcttgatccctatgaaataaccgtaccgttcatgagacaattctaaccgtgagcatttcgccggtttattgtttacggcgagacgggaatttgctcactttttgactttccgttacgcaacagaaaaagttaaaaacgaaaagactaaaatcacacgtcttgtgaccttctaaattgattcacatgctaaatctgataagttttaatttcaatggtaggtttatttcttagctttcgctagtaaactgataatcagacaaaatggtgacatgagggacattgtggaccctgtattctctatcggtatcagtagtttatgggatgagctgcgacatatgccagcaggcggcgtctggtggtttaacgtcgatcgccatgaagatgctatcagtctggcgaatcaaacaattgcatcccaggctgaaaccgcacacgtcgcggtcattagcatggacagcgatccggcgaaaatctttcaattagatgattctcaagggccggaaaaaataaaattatttagtatgctaaatcatgaaaaaggtctatactatttgacccgtgatttgcagtgttctattgatccccataattacctttttattcttgtttgcgcaaataacgcatggcaaaacattcctgccgagcggcttcgcagttggttggataaaatgaataaatggagcaggttaaaccattgtagccttttggtaattaatcccggaaataataacgataaacaatttagtttgttgcttgaggaataccgtagtctttttggtcttgccagtttgcgttttcagggtgaccaacatttgctggatattgccttctggtgcaacgaaaaaggggtcagcgcccgtcagcagcttagcgttcagcaacaaaatggtatctggacattagttcaaagcgaagaggcggagatccaaccacgcagcgacgaaaaacgcattctgagtaatgttgctgtactggaaggtgcgccgccgctaagcgaacactggcaactgttcaacaataacgaagtcctgttcaatgaagcccgtaccgctcaggcggcgacggtggtcttttctttacagcaaaatgcgcaaatcgagccactggcccgcagcattcataccctgcgtcgccagcgcggtagtgcgatgaaaatcctcgtgcgggaaaataccgctagcctgcgcgccaccgatgaacgtttgttattggcctgcggtgcaaatatggttattccgtggaatgcgccactctcccgttgtctgacgatgatcgaaagcgtgcaagggcagaagtttagtcgctatgtgccggaagatatcactaccttgctgagtatgacccagccgctcaaactgcgtggtttccagaagtgggatgtgttctgtaatgccgtcaacaacatgatgaataaccctctattacctgcccacggtaaaggcgttctggttgccctacgtccggtaccgggtatccgcgttgaacaagccctgacgctgtgtcgccctaaccgtaccggcgatatcatgaccattggcggtaatcggctggtgctgtttctcagtttctgtcggattaacgatctggataccgcgttgaatcatattttcccattgcctactggcgacattttcagtaaccgtatggtctggtttgaagatgatcaaatcagtgccgagctggtgcagatgcgcttgcttgccccagaacaatggggcatgccgctgcctttaacgcaaagttctaaaccggtcatcaatgccgagcacgatggtcgccactggcgacgaataccagaacccatgcgactgttagatgatgctgtggagcgcagtagttgatataagatgctgtggagcgctcatcatgatgaccatcagcgatatcattgaaattattgtcgtttgcgcactgatatttttcccgctgggctatctggcgcggcactctttgcgacgcattcgcgacaccttacgtttgttctttgctaaacctcgttatgttaaaccggccgggacgttacgccgcacggaaaaagccagggcaaccaaaaaatgactcaatttacgcaaaataccgccatgccttcttccctctggcaatactggcgcggcctttccggctggaacttctattttctggttaagttcggcctgttgtgggcgggatatcttaacttccatccgctcctcaatttggtgtttgccgcgtttctgctgatgccccttccgcgctacagcctgcatcgcttgcgccactggattaccctgccgatcggctttgctttgttctggcatgacacctggttgcctggcccggaaagcataatgagccagggtagccaggtggcggggttcagtaccgattatttaatcgaccttgtcacacgctttattaactggcagatgattggggccatttttgttttattagtggcctggttattcctgagtcaatggattcgcattaccgtttttgtggttgccatactgctatggctgaacgtacttaccctggcgggaccaagtttctccttgtggccagccggacaaccgacgaccactgtaacaacgacgggtggtaacgcagcggcaaccgttgcggcgacgggtggcgcaccggtagtgggtgatatgcccgcacaaactgcaccgccaacaacggcgaaccttaacgcctggctgaataatttctataacgcggaggcgaaacgtaaaagcaccttcccgtctagcctgcccgctgatgctcagccatttgaactactggtgattaacatctgtagcctttcctggagcgatatagaagccgccgggttgatgagccatccactgtggagccatttcgatattgagttcaagaactttaactccgccacctcctacagtggcccggcggcgatccgtttactgcgcgccagctgcgggcagactagccacactaatctgtatcaaccggcaaataacgactgctatctgtttgataaccttagcaaactgggctttacccagcacctgatgatgggacataacggccagttcggcggttttttgaaagaagttcgcgaaaatggcggcatgcagagcgaattgatggatcaaacaaatctgccggttattttgctgggctttgatggtagcccggtttatgacgataccgctgtgcttaaccgctggctggacgttaccgaaaaagataaaaacagccgtagtgccacgttctacaacacgcttccactgcatgacggcaaccattatccgggggtcagcaaaacagcggattacaaagcgcgggcgcagaaattctttgatgaactggacgccttctttactgaacttgagaaaagcggtcgtaaagtgatggtggtcgtggtgccggaacacggcggcgcgctgaagggcgacagaatgcaggtatctggcctacgtgatatccctagcccgtctatcaccgacgtccccgttggggtgaaattcttcggcatgaaggcaccgcatcagggggcaccgattgtcatcgaacaaccgagcagcttcctggctatctccgatctggtggttcgcgttctcgatggcaagattttcaccgaagacaatgttgactggaaaaaactcaccagtgggttgccacaaacagcaccggtctccgagaacagtaatgcagtagttattcaataccaggataaaccgtacgttcgcctgaacggcggcgactgggtgccttacccgcagtaagaacgaaaaaggccgcagagtttcccccctgcggcctggtccgggcgcaaattgccattacggcagcctgacgcccgcatgacacgttacttccgcttgttcagccagttcacgatcatactggcaagaatgccagcaatgaccggagccgctaaatcatgccagaaggccatgcccagctctgcgaacgtcatatagccgcctgtgttgtaatgacaacgtttcgcggctattcttgagtggtctagagtcaagattagcccccgtggtgttgtcaggtgcatacctgcaacgtgcgggggttttctctctccagcaaccaatgccaccagggataaagcccccgcaacattgcgcctcaccggaacctttccggcttgccgctgattctacgattgctttttactgtcagcacccggcaatcttcctcattgcgcgatgccttccagcttaatttctttatttgcaatagttgcagttcatatccgggctgactccagactggtagtgaaatgcgcaattttgtagaattgcgcctcctcgcgacctccccagtgaatctgttgcctcattttttacatactgcgtattcgacttctccacctgttgcgcaagagaaactgggtttattcatttttgcgaggccgacttctttctggacaggactttatgcagcacaacacactaagcaaacacaatcagaaattgccgtttacacgctacgacttcggctgggttttattatgcataggcatggcgattggtgccggaaccgtgctgatgccagtacaaattggcttgaagggaatttgggtatttattaccgcagcgatcattgcttatcctgccacctgggtagtgcaggacatttatttaaaaaccctttctgaaagcgattcctgtaatgactacaccgatattatcagtcattacctggggaagaactggggaattttcctcggggttatctactttttgatgattatccacgggatttttatctactctctctccgtggttttcgacagcgccagctacctgaaaaccttcggtttaaccgatgccgatcttagtcaatctctactttataaagtcgctattttcgccgtactggtggcgattgcgtctggtggtgaacgattactgtttaagatttccgggccaatggtggtggtcaaagtagggattattgtcgtgttcggttttgcgatgatcccgcactggaatttcgccaatataaccgccttcccgcaagcctccgtctttttccgcgatgtcttgcttaccattccattttgcttcttttctgcagtatttattcaggtacttaacccaatgaatattgcctatcgtaaacgggaagcggataaagtactggcaacccggctcgcgctgcgtacccaccgaattagttatatcacgctcatcgcggtgatcctgttttttgcctttagctttaccttcagtattagccacgaagaagccgtttctgcctttgaacaaaatatcagtgcactggcgctggccgcgcaggtgatccctgggcatatcattcatatcacctctacggtgcttaatatctttgccgtactgaccgcattctttggcatttatctcggtttccacgaggccattaaaggcattattctcaatctgttaagccgaattattgataccaagaaaattaacagtcgcgtgctgactctggcgatctgcgcttttatcgtcattacgttgacgatttgggttagctttcgtgtaagcgtgctggtgttctttcagttgggaagcccgttatatggtattgtgagctgcctcattccgtttttcctgatctataaagtcgcacaactggaaaaacttcgcggatttaaagcctggctgattctgctgtacggcattttgctatgcttgagcccactgttgaagctgattgagtaaaccggagcgcatggccccggttttgtgagttaacgctgcggattttcatcctgatcaacagcaaaacaagctaccagttgaccgccgtagtcttttagctgcggctgcaactgggtgcaggggccgaagcgccgacgacagcgggcgttgaaggcgcaacccggcggtggattcagtgggcttggtagttcaccgctgagcttgatgcgctcgcggcgatcgtccgggttcaggcgcggcgtcgcggaaagtagcgcctgagtgtacggatggcgcgggttattgaagatttggtctttcgttcccttctccacgcagcggcccaggtacatcaccatcacttcatcagcaatgtgctccaccacgctcaggtcgtgggagataaagacataagacagccccaactcctgctgcaaatccatcatcagattcagcacctgcgcgcgcacactaacatccagcgcggaaaccggttcatcggcaatcaccacatccgggtcgagcatcagaccacgggcgatggcgatacgctgacgctgaccgccggagaacatatgcggatagcggtcatagtgctcggttttcaggccgactttcgccatcatgctcagggctttttcccgacgctgttctttgcttaagctggtgttgatcagcagcggctcttcaagaatttgcccgacttttttacgcggattcaggctaccgtaagggttctggaagacgatctggattttctgccgacgcagcttctgcgcctgcggatcgtgcttaagcagatcctgcccctggtaatacagctcgccaccggtgggcatttcaatcatcgtcagcaaccgaccgagggtgcttttaccgcagccagattcgcccactactgccagcgttttgccacgttcaaggttaaagctaacgccatccagcgctttaaccagacgttccggcgcgaacatgcctttcttcaccggataatgttttttcaggtcgatagcctgcaacagcggttgttgcagggtggcctcttgcgtactcatagtgtcggcctcccggcatcatcaagtgggtaatggcatttggactgacgcccgtcagcgagcatattcagcgccggttcttcagcgcgacatctgtcagtggcataggggcagcgcgggttaagcaggcagccgttcgggcggtcgtacttgccgggaacgacacctggcaagctcgccagacgttctttgtcctgagcaaattctggcagcgcacgcagcaatgcctgagtatacgggtgacgcggcgcatggaagatggcgtgcgcatcaccggtttccaccacctggcctgcatacatcacgatgattttatgtgccgcttccgccaccagcgccaggtcatgggtaattaacaccagcgccatgttctctttctgctgtagctccagcagtagttcgatgatttgcgcctgaatggtcacgtccagcgcggtggtcggttcatcggcaatcagcagttttggccgacaggcaatcgccatggcgatcatcacgcgctggctcatgccgccggaaagctgatgcgggtaaacatccagacggcttgccggatcgggaataccgacctgattcagcaggtcaatcgctcgctgacggcgggtacttttgttgccgccctgatgcaccttaatcgcttccataatctggaaacccacggtgtagcacgggttaaggctggtcatcgggtcctggaagatcatcgccacttcggcacccaccaggttgcggcgctctttttcactgatacgctgcaaatcctggccgttaaactccagtttttctgccattacgcggcccggataatcaatcagccccataatcgccagactactgacgctcttaccggagccggactcacccacaatcccgaccacttcgccctgttttacgctgtagctgatgcggtctacggcgcggaacggcgcgctttcgtcgccgaaatgcacgcttaatttatctacatttaataacgccatctcgaacctcttactgcttcagtttgggatcgagcgcgtcacgcagaccgtcacccatcaggttaaatgccagcaccgtcagcaggatcgccagacccgggaaggtcacgacccaccaggcgctttgcgcgaactgcaacacgtcggagagcatggtgccccactcaggcgttggcggctgtgcccccatgccgaggaaaccaagagcagccatatcgagaatggcgttagagaaaccgaggctcgcctgaacaatcagcggcgcaaggcagttcgggaagatgttaataaacatctgacgcatcgccccggcacccgccacgcgagacgcggtgacgtaatcgcggttaacttccaccagcacggcggcgcgggttaagcgcacatagtgcggcaaggcaacgaaggtcagtgccagcgcggcgttaccaatgctcgggccgaaaattgccaccagcaccagcgccagcagcagacttggcagcgccagcatgatatcgaccacgcgcataatgatgttatcgaccaggccgccaaagtaaccggcgatcaggccgagaataacgcccataatcaggcttaacacaattaccagacagccaaccagcaggctcaggcgcgcaccgtacatcaggcggctcagcacatcacggcctacgtcatcggtgcccagcaagtgcgccatgctgccgccttcctgccaggctggcggggcgagcagtgcatcgcggaactgttccgccgggttatagggtgcaatccagttggcaaagatcgcgatgaacagcacgatgacgacgtaaaccagcccgacgaccgcgcctttgttgcgtttaaaatagtgccagaactcctgtaacggggtcatcggcaccggtgcgctaatcactttattttcagtaacctgactcatgatgtccccttacttcttatgacgaatacgcgggttcaccacgccgtacagcagatcgaccagcaagttgacgaggataatcatcgtcgccaccagcaatacgccgccctgcactaccggatagtcgcggcgttgcagtgcgtcaatcaaccagcgtcccagaccgggccagctgaagatggtttcggtcagaatcgcccccgccagcaatgttcccacctgcaggccgataacggtcaccaccggcagcatcgcgttacgcagcgcatggacgataatcacccgcatgcgggttagccctttggcgcgcgcggtgcggatgtaatcctcgcccagcacttccagcatgctggagcgtgtcatacgcacaatgaccgccagcggaatagtacccagcacaatggcaggcaagatcatatgggcgacggcatcgataaagttgccgtcttcaccccagatggcggtgtcgattagcataaaaccggttaacggattggagtcatcgaggaacaccatatcgctcacgcgaccggagacgggcgtcaggttccagtgcacgctaaccagcatgatcagcatcatgccccaccagaagataggcatactataacctgtcagcgccaggccaaccgctgtgtgatcgaaaatggaaccgcgtttaaccgcagccagcacgccgaccggaataccgactgccgtagcaaaaatcatcgcgcagacgccaagttccagcgtggcctggaagcgcggcacgaactcttcccaaaccgggatgcggcttttcatactaatgcctagatcgccatgcataacgccccaaatgtaatggagatactgctgccacatcggtttatctaagccgagttcagccagcagctgcgcgtgacgctctggggagatcccacgttcgcccgccatgatcatcaccggatcgcccgggatcatgtggacaaaggcaaatgtgagaagggtaataccgataaacgtggggatgacgagtcccaaacgtcggagaataaactgcaacataacccggattctctatagtgacccgcagcctggaactgcgtgtctgtattgctcacaaatcaattcccgcccttatcggacagggaatgaagtattgctgccggatggcgctgcacgcagaggcacagcgccaccgggtatacagattgttgacaaagtgcgctttgtttatgccggatgcggcgttaacgccttatccggcctacaaaatcgtgcaaattcaatacattgcagaattttcgtaggcctgataagcggagcgcatcaggcatttttgcctttgccatcagtcttgtatggcttttaattattcgatagagacgttttcgaagtgatgtttgcctaatggatcaaccacatagcctttaacttctttacgtaccggttcaaacacggtggagtgagcgatgatcagtgccggagcctgatcgtgcatcaccacctgcgcttgtttgtacagttcaacgcgtttattgtggtcgtcggtagcacgcgccggttgaatcagatcttcaaacggtttgtagcaccatttactgtagttggagccttgttcagaggcggcgcagctgaacaggatggcgaagaagttatccggatccccgttatcgccagtccagcccatcattaccgtctggtgctcgccatctttcgcacgcttgaggtactcaccccattcgtaggtgacaattttggcctgcacgccgactttcgcccagtctgcctgaatcatctccgccatgcggcgagcgttcgggttatacggacgttgtaccggcatcgcccacaggtcgatggagaaacctttttccagacccgcttctttcagcaaggctttcgctttttcaggatcgtaggtgtagtcctgaacgtcgtcgttatagccccacatggttggcgggatcaggtttttcgcacttacgcccgcgccctgataaaccgctttgatgatcgcgtctttgttcaccgcgtaggtcagagcctggcgaactttcacgtcatcgagtggttttttctgcacgttatagctgagataaccgacgttcagccccggcatttccatcagattgatggatttatcctgcttcatgcgagcgatatctgccgggttcgggtacggcatcacctggcattcattcttctgcaatttcgcgtaacgcacggaagcgtcaggggtaatagagaaaaccagcgtatcgatctgcggtttggtgccccagtagccatcaaacgctttgtagcggatacgggaatctttttgatactgctgtaactggaacggaccggttccgattgggttgaggtccagtttttccggtgtaccggctttcatcatcgcatcagcatattctttactcagaatagaggcgaagtccattgccaggtcagcgaggaacggcgcttccgggcgagtcagcacaaactgaacggtgttgtcgtccacctttttcacttcactgatcagctctggcaagcccatgccttcgaagtattcgtagctgccgccagaaactttatggtacgggttttgcgcgtttttctgacgatcgaagctgaacaccacatcatcggcgttcagttcacgcgtcggtttgaattctttattgtcgtgccacttcacacctttacgcagatggaaggtataggttttaccgtcttcgctgacttcccacttttcagcgaggcccgggatcacttcggtggtgccgattttaaattcaaccagacggttataaagcgggacggaagaggcgtcataggtggtgccggaggtaaacagctgcgggttaaacccttccggagatccttcactgcaataaaccagagttttagcctgaacacttgctgcgacggtcatagccaccaggctgagaccaagcttcagcatcccactctttttcaaggaaatacgcattattctgctccaattgtgatgtttgttgttttaaccctttgcagtgggttgtcgctgcctgaccttttttgttttttgcccggtcgggtcaacgttatgaggtggggatgccgtactaattaacatcagtgtaacagtgcggatcctccataaaatgcccctcgtgacctacaatctgtcaacagaatgtgaaaacgtcaatacagccaaccgggatttacaccaacggtgagaatccacacacaaagattaaaaaaacttcaaacagctatttgcagcagagaaatttgtgctactccaacatgaccagaacaatcagcttaatatttagcaacatttggtgattaagttttatgcatttaatgaaaaaaatctgaggaaaaggtggatatctgagcgattaataccatgaacgctaaaacgcacagcggaaaatgccagggccagccataagtaacgcaaaaaaagatttaagcaaatataaaaaaagacaatggtttctgtcacaaatccgttaatggatagtgagatatggggcgcaaatttggcagggaaatgtgtgtcgtgtaggtcgaataaggcggtcgcgccgcatccgacaatggccggcacatttgcctgatgcgacgctgacgcgtcttatcaggcctacgtcgagtcgaacctccctgcccccggaggttctcatcctcatgagctgcagatgcaaaaaagcctgctcgttgagcaggcttttcgaatttggtcggtgatagaggattactcgccacttcgtggctcgccctgcgggccgttgctggcgcaacgttctctcgcttcgctcgagtcgaacctccctgcccccggaggttctcatcctcatgagctgcagatgcaaaaaagcctgctcgttgagcaggcttttcgaatttggtcggtgatagaggattcgaacctccgaccccttcgtcccgaacgaagtgcgctaccaggctgcgccaatcaccgaatgcggggcgcatcttactgcgcagatacgccctcgtcaatcccttaatagcaaaatgccttttgatcggcgagaaagtcagcaggccgcttagttagccgctgcctcttttgcctgcgggatgtgacaccagttgttgttttcgttaattccaccatccggactagtatagccaagacaacccatgatggtatcgtacagctctacgtgacggcgtggcactttcatgtcggcttcttttttcagctgcgcaaacgcctgcgcattggccggattttccagatatttatcactcatccagaccatcatcggtacgcggaactgctccggcggtgccagttcacgcggcgtgccgtgcaggtgctcgcgttcattaatactctcaccgtggtcagctgcgtagaacacaatcgctttcttatcgcgaacctgatcaatcacgctggagataaagtgatccacataggtcacgctgttgtcataggagttgatcatctgcgctttggtacagccgctatcaacaccaatacattccggcttccactgcgcgaagctacgcggataacgctgggtgtagttaaaatggctacctttggtatgcagaatgatcagatgcttaccatccgggttgcgccctaggctttgctgcatttcgtctaccagcaacatatcatctaccggcttgccacgattacgtggctccgcaccaatctgctcacgataagcaatgttgtccgccatcgtgttgctgtagaaccacatttcgctctgcatagcgtagaggtcagaactgaatcctaactgcttcagaaccgcgaaaatgttctgttcttttaatgtgcgctgcggattatcttccgcgcccccctgacgtacaaacatgcaacgcagactgagtttggttgcggtatcacaggagtaaccacggaacgccgccagatttttctcctgggccagtttcggcgtggtattacgctcatagccgaaaatacccatatggtcccaacgcgtggtttcaccgatgataaacacgacataagtgtcatcaacgttttgcggtgcctgataagtgaatttcttcgccggattaagcaaactattattatcggaagattcatcgacccgcgcccaggcatacagccccaacgcagaaagccagttacttggcagataagagttcgctacgacaccgccataactcggcaaatcaacgccggtcgccctctccactttcttctgctggatatccagcaaacgaatcggtgcccaaaccataatacccgccagtacgacgaccgccaggctgcgaatacgctgccctggggttcgcagttgtcggagcaaggtgtagcgacagcggttattccagataaggataagaggcaatgcactaacggcgattaaccagagaataaagttcagaccaacaacttctttactcaggtcgatatcggtggtcatgacggaagcgatgatgccataaccaatgaccacattaaggaaggtcatgtaatagctggcacctgcggaaaagagcaccaccaggcttgccagaatacgccagctgcggcggccaaacaggctaagaagacgtagtaaaaagaaggtcaccagtacggtggcggccagttcaacaacagcagaaatgcctttccagacggtaaaatcgtgcgcatagctgccgaagcggcggtaaaaaaccgcgccattcataaaaaggccaatatagattgcaagcaaaaagctcagcttctgctgtgtaatgcttttgatgtatctcatgcaaacaaaccctggacaaacaggtgataacaccctgcttagtggcttttcaggcccggcagggaaaaagtgcggaggtagtcagataagtaaaatctacacgcgcgaataagtagaccacagcaaagggaaaaagtgtggggaaagagtgtgcatgaagcacaaatttacaaaaatgcaagtttgaaaagagactttagcgttacaaaaagcagtaaaaagggccagttaattggcccaaattttacgagtcattgtttatacatttcgttgatgcgtttgatgcacacggaagctgaagcccagtagctcgcggctgagcattaaagggagccatgcgcctcacgcaacattttctgctctggctgacgaatcgtcgtagaaagcgccaaactcagaatcagcagggcgaaaatcacgtagaaggtcacatagaagccgccaaacagactggcgataatgctaccacaaatgctaccgataccgaaaccgagataaatcacaccgtagtttttcgccaggttattgaggccaaagaactcactgaccagactcggaaagacggtaatagtgccgccaaagttaaatgccacgcaggcaatcgctgcaaagaacgtcactgcattcaatggtgcaaacagcagggccgccatacccaccaggcttatcacctgaccaatggtaataacacggatacgggcgattttgtcagacagaatacccagcaccagacgaccactaaggttggcgatggaaataacagtgactgcattggctgcggaaaccacatcaaggtgtgccagactttgggcgatatctttcgctaccccaatcacgtacaggccgctcatgcaggcggtcaggaacattaccgctaacatccagtactgcggtttacgcatgctctctgccagcgtgtaatctttctccaccacaccattgctggttttcacttcctgttttggtgcgtctttcattaacgttgcgccgaaaacaatcatcaacagcgcaatcgctccccaaatcacaaaggttttttccagaccgaccgtttccagcagctgcgtgtcgataaatttgaaacccaggctacccagaccataagaaccgatagcgaacgcggagatcagacctttacgctccgggaaccacttcacacagttagagagcgtcagcagataacccgcgccatctgccagtcccaccagcacaccggcgcttaaccacagcatcatcaggttgtcagaatgcgctgtcaggaagaagcctaatcccagcaaaatgccggaagccatggtgacgcgtttaacgccaaaacgttcctgtaatttgcccgcaacagaagagctaattgccagccccagacttaacaagccgaaagagaaagcgacctggcttaccggcgcatccagcttggcggaaagcgcgccattaaacaggctccaggtataaacgctccccagcgcaaactgggtaatgatagtaccgatgagtgtcagccagcgggtacgctgataattactaggtgtcatggcagtattcctgcagtaataaaaaggaaaaatctctgccgacaaccataacgaagtgcactttatgcctggggaaaaacggcatgaaatgccatcagaacggaatgaaatgccttagttcaggaatgaatgacgcgacaattattcaccaaatttattatttggtaagttagcacccactatcgccacaactattgttatttaatggtttcaattgtgactgttacgttaaaatctggcgctaacccccatcgtatacagatagtcgctattattagtggtattttctgcctgagttagcgcggcataggcggcaatattttgattgagcaacatatcagcgcctacggtgacatccagccagttgccgttctggtttgtcgccgtcatccggctcaggccactttgcgccttccagatattctcgccaaattgctggttatagctgatttgcgcccagggtcggagatcgccaagccgggagtcaacacgccagcctaaggtactcacgctggcatgccataacggatcggtcagcgtggtagtactgtcgccaaactcgttatacatgctggtggttgtgccatcgtaatgtaatgccgcgaccgggccggttgtaacctgttcatataaaggaaaattccagcccatactcatactgctggtcacatccacaggggtttcttccgccagattgacttccagtcccagcgccctttggctactttgaatacgttggctcaaaatatcgttgtaatcaggttgatgatcactatcccaggtgtaacgctctgtggaaagtccgggttgcgtatcaacgatatattcttgttgccaggcgtaagctgtgttgagaaaaaaggcactgattaccacgctcgccagcaggcttagctgccagcgaccaccgcttttttttatgatcattaacacgactccagggaagagccgaattcggcaatattattgtcattgtatgaaggatatcgggcatagtagccctgtattaaatattgactttttcaccgatgcgtcaagaaaagcggctgaaatttttacgatcgggtacatagcgagggaaagtatggaacgttgcggctgggtgagtcaggacccgctttatattgcctaccatgataatgagtggggcgtgcctgaaactgacagtaaaaaactgttcgaaatgatctgccttgaagggcagcaggctggattaagctggatcaccgtcctcaaaaaacgcgaaaactatcgcgcctgctttcatcagttcgatccggtgaaggtcgcagcaatgcaggaagaggatgtcgaaagactggtacaggacgccgggattatccgccatcgagggaaaattcaggcaattattggtaatgcgcgggcgtacctgcaaatggaacagaacggcgaaccgtttgtcgactttgtctggagctttgtaaatcatcagccacaggtgacacaagccacaacgttgagcgaaattcccacatctacgtccgcctccgacgccctatctaaggcactgaaaaaacgtggttttaagtttgtcggcaccacaatctgttactcctttatgcaggcatgtgggctggtgaatgatcatgtggttggctgctgttgctatccgggaaataaaccatgattcgggaagcgcaacgtagtgaactccccgcgatcctcgaactgtggctggaaagtacaacctgggggcatccctttataaaagcgaattactggcgtgactgcattccgctggtgcgggatgcctatcttgccaacgcgcaaaactgggtctgggaagaagacggtaagcttctcggttttgtcagcattatggaaggccgatttctggcagcgatgtttgtcgcaccgaaggccgtcaggcgcggtattggtaaggcgctgatgcagtatgtgcagcagcgccatccccacctgatgctggaggtttatcaaaaaaatcaaccggcgataaatttttaccaggcacagggttttcacattgtcgattgcgcatggcaggatgaaacccaactacccacatggattatgagctggccggtggttcaaacgctgtaattaactgctggccggtggttcaaacgctgtaagtgtcagttccggaccgttgtatttttccagccatgccagcgccgtattacccgcacagccattccccagccggctgctggggagatctttggtcagcacgttcactgcgccgtttttacaaataccgtcagcggttaaatccagatccggccatgccccttcgtgaatgcaaatcacgccaggtttaattccctcgctaatgaccgctccggcaagaatttgcccgcgtgcgttccacaaccgaacagtatcgccatcttgtatgccgcgctcctgggcatcgtcaggatgaatggtgacaggctcacgatttgccaccgcgtacaattcgcgcagagaactgtaattcagctggctgtgcaggcggtgcgccggatgggcagaaagtacctgcaactgttctggttcggcattgccctgccattcgtccggctccagccacattggatgcccagggcaatccgggtaaccgtaatcggcaatacgctgactgaagatttcaatcttgccgctggcggtttttaacggatgcgccagcggatcgcggcaaaaatcagcgaagcgaataaaccgctcgctgtccgggttttccggcatctcaattaactggttggcttgccagaactcagcaaatggcggcaattcaacctgctggcttgccccgcgctgtcgggcaacgttataaaacgtttccagccattgcagctcactttttccttccgtaaaacgtgcataaccgcccttctcccagcgttcacttaactcggcaaaaacatcaaaatcattacgcgcttcatagcgtggcggcaccacttgcttcatcggcaccagatgctgattactgtaatcaccggtcatggtgagatcattacgctcaaaagaggtagtcgcaggcagaacgatatccgcgtgttttgccgccgccgtccagaagcattcagagatcaccaccagctccggtttttgccaggcacggatcaggcgattggtatcctgatgatgagtaaagttggcaccgcccgcccaccagataaaacgaatatccgggaaatgtcggttcataccgttgtgttgatatgcgccaccagggttttccagtgcttcaacaatgcgggcaacagggattttatccaccgcatcgcagccacccggcaagctgccctgcatggaagagagcaccgcagaacgccgcgtggggttaccaccattggcaaaatggtaagaaagaccaaaaccgccgccgggtgtgccgatttgccccaacattgctgccagcgtgacgatcatccagtgtttttgctcaccaaactgttggcgctgcattccccagcctgccatcagcatggtggtattttggtggaaaatagccgccagctcgcggattttcgctgcgccaacaccacaaatctctgctgcccattcggcggttttcgctattccgtcactctcgcccagcaaataagaggcgaagacggcataacctgtggtgcaacgcgccagaaacgcttcgtcgtgccaaccattttccaccagcgtatgggcgatccccagcatcagcgcaacatcggtgcccatgtgcggtgccacccactccattttatcgccaaagaaatcgacggtttcgcttcgcattggatcaatgcagatcagctttttcccgctgtcacgcagtgcagaaaagtaagaaagcccctgctcatcggatgcattccacgcaattttcagcgtattgagtgggttagcactccacagcaccacgacatcgctatgttccagcaccagcggccaactggtctgctgttgataaacttcactaccacccacgacatacggcatgatcgcctgtgccgcgccggtgctataatcccccagatgcccggtataaccgcctgccagcgccatatagcgttgtaataatgtgctggccttatgcagcacgccgttactacgccagccgtaggaaccagcaaaaatgcttgccggaccataagcctcacgaatgcgtttatgttgttggtgaataagatccagcgcctcatcccaactcacgcgaacaaattcatcctgcccacgaatgccttgcgggttttccggactcgcaagaaagccttttcgcaccattggaaatcgtacccgcgtattgctgtgaacctggtcgcgaaccgcgctctgcaaggagttttccattcctgtggctaacgcgccacggctgctaaacacggtttcgccgtcggtttcaaccagcatgggcccccaatgggcggcagtcagaacggaatatcgtgaggatgagttggccaaaccgaagactcctgaaaggttagatgtattgagcagttaaatattacttacaaatttccgagtattcccaggaataatcttcatgttcacgcggcataatctcccgccacggaacccgtggcaaagaataaaaaggttattaaggattaacaatgaagaaacgtgtttatcttattgccgccgtagtgagtggcgctctggcggtatctggctgcacaactaacccttacaccggcgaacgcgaagcaggtaaatctgctatcggcgcaggtctgggctctctcgtgggcgcgggtattggtgcgctctcttctagcaagaaagatcgcggtaaaggcgcgctgattggcgcagcagcaggcgcagctctgggcggcggcgttggttattacatggatgtgcaggaagcgaagctgcgcgacaaaatgcgcggcactggtgttagcgtaacccgcagcggggataacattatcctcaatatgccgaacaatgtgaccttcgacagcagcagcgcgaccctgaaaccggcgggcgctaacaccctgaccggcgtggcaatggtactgaaagagtatccgaaaacggcggttaacgtgattggttataccgacagcacgggtggtcacgacctgaacatgcgtctctcccagcaacgtgcggattccgttgccagcgcgttgatcacccagggcgtggacgccagccgcatccgtactcagggccttggcccggctaacccaatcgccagcaacagcaccgcagaaggtaaggcgcaaaaccgccgtgtagaaattaccttaagcccgctgtaatccctttcatgccaggtgatgcagaaatcacctggcattcttcagttttccttcatcatatttcaggctaaggtgatcgccttatcagtgaatggagagaagcatgaagccgtccgttatcctctacaaagccttacctgatgatttactgcaacgcctgcaagagcatttcaccgttcaccaggtggcaaacctcagcccacaaaccgtcgaacaaaatgcagcaatttttgccgaagctgaaggtttactgggtagtaacgagaatgtaaatgccgcattgctggaaaaaatgccgaaactgcgtgccacaagtacgatctccgtcggctatgacaattttgatgtcgatgcgcttaccgcccgaaaaattctgctgatgcacacgccaaccgtattaacagaaaccgtcgccgatacgctgatggcgctggtgttgtctaccgctcgtcgggttgtggaggtagcagaacgggtaaaagcaggcgaatggaccgcgagcataggcccggactggtacggcactgacgttcaccataaaacactgggcattgtcgggatgggacggatcggcatggcgctggcacaacgtgcgcactttggcttcaacatgcccatcctctataacgcgcgccgccaccataaagaagcagaagaacgcttcaacgcccgctactgcgatttggatactctgttacaagagagtgatttcgtttgcctgatcctgccgttaactgatgagacgcatcatctgtttggcgcagaacaattcgccaaaatgaaatcctccgccattttcattaatgccggatgtggcccggtggttgacgaaaatgcactgatcgcagcattgcagaaaggcgaaattcacgctgccgggctggatgtcttcgaacaagagccactgtccgtagatagcccgttgctcagtatggccaacgtcgtcgcagtaccgcatattggatctgccacccatgagacgcgttatggcatggccgcctgtgccgtggataatttgattgatgcgttacaaggaaaggttgagaagaactgtgtgaatccgcacgtcgcggactaagccgcgactgcgtagagtaaagcccgataatcgctcgggcttttactctttattgggttgcagtaactgctgtagtccaggcctgattaaacgcctgatgctgtgccggtaatggcgcaatcagtttgttatattcacttgcctgctgactagtcgggaactggatgccatttgcgacaaagctcacctgagtaccttgctgagcaatgtagtctccaaccatcaccagttgttgcgtgaaagtttgtgccgccggaatcaacggttgcaatgcatcagctggcgtcgttaccactttggtgaatgcctgatcaaagaccggtttcaaatcatcgctctgttttagcgcagagtgcgcagcatcggcctgcaacttcgcattttgcagttgttgcgccagcacacccaggctaccgttcatttcacgcagcggaccgctttgcgtaacgtaatcctgcggtacgcgaattgcgttaacgctgtctacaaccgggcgcagaccggaatccatcgcctgattcacctgctgagaataaccatacagaatcgcgtaatcagagacaaaaggaccaaactgttttttctgatcggcagtcagggttggtagacgttcaccgctacgcatcactgtattctgcaggaagtcgataaacgctttacgctgatcgccttctttatcaaaacacccactcaggctaactaccattaataacgccgcaagaggcgcaaaccagcgagagcaggactttcctgtcgccattttcttactcctttcacccaaaaaaagcgcacaacgacacacgcgtgtctgacgtgacaaggatagtccaggacaggcttgcaggataccctttctacgtaatcttcctggtaaaatcatggagaaaatgaaacaaggttaatttgttgtttcattgttaaaaaatgatagtgccgttgccttttttgtagccagagatttacgccttcgcagaaggttagattttcgaaatctttacaaaacaggagtggtaagagatatatcggcatttatcagatcgttaggtggctataagtcacgctaaatgacaggctgaatcgaatcatagccagagcatgccctgacttcaccccgctgtgtctgcttttcccgactattcttaatgagcttcgatgcaattcacgatcccgcagtgtgatttgaggagttttcaatggaatataaagatccaatgcatgagctgttgagcagcctggaacagattgtttttaaagatgaaacgcagaaaattaccctgacgcacagaacaacgtcctgtaccgaaattgagcagttacgaaaagggacaggattaaaaatcgatgatttcgcccgggttttgggcgtaagtgtcgccatggtaaaggaatgggaatccagacgcgtgaagcctagtagtgccgaactaaaattgatgcgtttgattcaagccaacccggcattaagtaagcagttgatggaataaacttttatccactttattgctgtttacggtcctgatgacaggaccgttttccaaccgattaatcataaatatgaaaaataattgttgcatcacccgccaatgcgtggcttaatgcacatcaacggtttgacgtacagaccattaaagcagtgtagtaaggcaagtcccttcaagagttatcgttgatacccctcgtagtgcacattcctttaacgcttcaaaatctgtaaagcacgccatatcgccgaaaggcacacttaattattaaaggtaatacactatgtccggtaaaatgactggtatcgtaaaatggttcaacgctgacaaaggcttcggcttcatcactcctgacgatggctctaaagatgtgttcgtacacttctctgctatccagaacgatggttacaaatctctggacgaaggtcagaaagtgtccttcaccatcgaaagcggcgctaaaggcccggcagctggtaacgtaaccagcctgtaatctctgcttaaaagcacagaatctaagatccctgccatttggcggggatttttttatttgttttcaggaaataaataatcgatcgcgtaataaaatctattattatttttgtgaagaataaatttgggtgcaatgagaatgcgcaacgccgtaagtaaggcgggaataatttcccgccgaagactcttactctttcaatttgcaggctaaaaacgccgccagctcataactctcctgtttaatatgcaattcacacagtgaatctcttatcatccgggtgaaaaataaaagcgtgaaacaaatcactattaaagaaagtaatctatatttctgcgcattcccagcctcctgtgttgatttccaacgagtataactttgatttatagtcaggtggggcttttctctgtctgcctttcggtgaatacctgagacaaacagtctcaagcacccgtggctattctagcttaataagtttgtttcttctccttgatataatcctaaaaaaatctcataaaattaatatatgagataatctttattcagcagaagattattaaaggttgctgtattatttagcgataaaaaaagcctgccagatggcaggctatttaataacggcgttattattgcaacaggctaatatccgcaacgcgcaggaacagttcgcgcagtttctccagcatggtcagacggttgatacgcaattctttgtcatcaaccatgaccatcactttatcgaagaaagcatcaaccggttcacgcagctcagccagttcgaccagcgcatcctggtaacgaccttccgtaaagtacggctccagcttgtcacgtagcaccacaacctgcatcgccagtttaatttcttccggctctttcagggtagaggcattcacgcggtcgctcagcacttcgtcagatttcgccagaatgttagatacacgtttgttcgccgccgccagtgcagcagctgcatccagggtacggaaatggcttaccgctttcatacgggcatcgaaatcagccggacgagtcggacgacgcgccagtaccgcctggatggtgtcaacggtataaccttcgtcctgataccaggcgcggaagcgaccgagcataaagtcgataacatcatcaactacgttggcattagtcagcttatcgccatacagacgcaccgcttcttcggtcagcgtttgcagatcaaggttgaggttcttctcaacgataattcgcagcacgccaagcgcggcacgacgcagcgcaaacgggtctttgtcgcctttcggatgctgaccgataccgaagatacccgccagggtatccatcttgtcagcaatcgccagcgcacaagctactgggttggacggcaggtcatcaccagcaaaacgcggctgatactgctcattcagcgccaccgcgacatcttccgcttcgccatcgtgacgcgcatagtgcatccccataacgccctgggtgtcggtgaactcgaagaccatgttggtcatcaggtcgcacttagacagcagacccgcacgggtagcgtggttaacgtcagcgccaatctgttcagcaatccagccagccagcgcctggatgcggtcagttttgtcgcgcagcgtccccaactgttgctggaacaacacggtttgcaggcgcggcaggttatcttcaagacgttttttacggtcggtgttgaagaagaactcggcatccgccagacgcggacgaacgactttctcgttaccggagataatctgctgcggatctttgctttcgatgttggcaacgaagataaagttcggcagcagtttgccgtcgttcgcatacaccgggaagtatttctggtcacctttcatggtgtaaaccagcgcttcagccggcaccgcgaggaatttctcttcgaattttgcggtcagaacgaccggccactccaccaggctagccacttcttccagcaggctttcgcttaagtcagcgttaccgccaatcttacgcgctgcttcttcggcatcggctttaatcttcgccttacgttcttcgtaatcggcgatgactttcccacgctcacgcagaatttccggatactgatcggcgttatcgatggtgaattccggctcgcccataaagcggtggccgcgaatcacgcgatcggactgaatgcccagaatggttgccggaatgactttgtcgcccagcagcagggtcacggtgtgcaccggacgcacgaagtgcacgtcgcttgcgccccaacgcatcagtttcgggatcggcagtttcgccagagaagtcgcaaccatattcggcagcagtgcttcggtgctttcgcccttcacatgggcgcgatacagcagccattcgcctttatcggtagtcagacgctcagcctggtcaacggtaataccgcaaccacgcgcccaaccttctgccgctttgctcggtttgccttcagcgtcgaacgcctgggcaatcgccgggccgcgtttttcgatttcacgatccggttgcgcttccgccaggttagctactttcagcgccagacgacgcggagcagcaaaccattgaacggtgccgtgtgcgaggccagcgctatccagctccgcagtaaagttcgcagcaaaggactcagccaggctgcgcagtgcttttggtggcagctcttcagtgccgatttccaccagaaaagttttctcagacatagccgcctcttacttatctttgttgcacatcgggaagccgagggcttcacgggaagcgtagtatgcttctgccactgctttggtcagggtgcgaatgcgcagaatgtagcgctgacgctcggtgacggagatggctttacgcgcatccagcaggttgaagctgtgggcggctttcagaatacgctcgtaggctggcagcggcagcggattttccagcgccagcagctgctgcgcttctttctcgtactgctcgaagcaggtgaacaggaagtccacatccgcgtattcgaagttgtaagtggactgctccacttcgttctgatggaacacgtcgccgtaggtggttttacccagcgggccgtcgctccagaccaggtcgtaaacgctgtctacgccctgaatgtacatggccagacgttccagaccgtaggtgatctcgccggtaaccggtttacactccagaccaccaacctgctggaagtaagtgaactgcgtcacttccatgccgttcagccacacttcccagcccagtccccaggcacccagcgtcgggttttcccagttatcttccacgaaacggatgtcgtgaatagtcgggtccatgcccagctctttcagagaaccgaggtacagctcctgaatattgtccgggcttggcttaatgaccacctggaactgatagtagtgctgtaaacggttggggttttcgccgtagcgaccatcggtcgggcgacgagaaggctgaacataagcagccgccatcggttctggccccagctcgcgcagacaggtcattgggtgagaggttcccgcgccgacttccatgtccaatggttgaacaatggtgcagccctggcgagcccagtaatcctgtaaggtcaggaacaagccctggaaggtcctggtatcaaacttttgcatattatttcgtgctggatacgtgtggatttaaaggaagggatcagtatacccgctggatggaagatatacagtacgaaacgggaaaaagcagggcttaacgcatggaaagatgcaaaaaatggccatccgcgtcaaaagaacagacaaactgctctttacggaaggtataaccgcgcatttcatagcttccctggaactgttcgaaggcggtgacgtcgattttttgctcgccggtgttataacgttttgccgcctgatccttgcataacgcttccatattcaagctacgcagaggatcaacctttacccgttgtgctttctgcacgggactcggtatagaacaacccactagcaccataagcgccattgccggaaagaaagcgttcatcatcattaaattaccgtctggtttgcaggtgagtcttattatttatatcggtatagtggctgatatcttacgaatttccttaagcctctataagctgtagtgataaaactcagattattccagtgcgccaaccaaatgatttatcggtcagactttttttaaccagatacagagacacagatgcagcccaaaatttactggattgataacctgcgagggatagcgtgtttaatggtggtgatgattcacaccactacctggtatgtgaccaatgctcatagtgttagccccgtcacatgggatatcgccaatgttctgaattctgcctctcgtgtcagcgtgccgctatttttcatgatttccggctatctcttttttggcgaacgcagcgcccagccgcgccatttcttgcgtatcggcttatgtctgattttttatagcgcaatcgcactgctctacattgcgctgtttacctccatcaatatggagttagcgctgaaaaacctgctgcaaaagccagtgttttaccacttgtggtttttcttcgcgattgcggtgatttatctggttagtccgctgattcaggtgaagaacgtcggcggaaaaatgttgctggtgctaatggcggtgattggcattatcgctaacccaaacacagtgccgcagaaaattgacggttttgaatggctgccaattaacttatatatcaatggcgatactttttactacattctgtatggcatgttgggccgcgctatagggatgatggacacacagcataaagcactgagctgggtgagcgccgcgctgtttgcgacgggggtttttattatctctcgcgggacattatatgaattgcagtggcgcggaaattttgccgatacctggtatctttactgtgggccgatggtttttatctgcgcaatcgcgctattgactctggttaaaaacacgctggatacgcgtaccattcgcggacttggcttaatctcccgccatagtttgggtatatacggattccacgccttgattatccatgcgctgcgcacccggggaattgagcttaaaaattggccaatactggatattatttggatcttttgcgcgacgttggcagcgagtttgttactttctatgctggtacaacgaatcgacagaaacagattagtgagttaagtaaaagcccggtcacattggactgaccgggcttacgtgagttattcgctgtattcttcctgggtaacctgtgtttcttttggtgggtttattccggcatcacgaatatttttctgcaccgctactgcaccaaacaagcttaagaagaaagccagtccataaaaacctttttcgctgagtaataatgtcgcattccacagacctaccatcagtaatgcaacagagataataaagacagtcaggcaggtcatataataaatggaagtggtcggtatgccttcatacttgtcccgaacggtcttttgataagacgccgcagaaaacagtcctaataccagtacggcaaaataatatcctttttcatttaactgcatctctgcattccatagccctaacagataggtaacgataccaccaacgagagctatccaactcacaatactaaaggccggactataggtacttattttgttgtccatcacagtattcctttcattcctgaatatgtaagagctttatgttgctcatgcgctgcgaaacaaacgcatttgaccaaacaagcagacaaaaaaggcgatgggatagatcaccatttcataagtattgataggtgcgtttaaaacaccgataaacaagagaccgatagtgattaacgcaactaactggcagatatgggtaaaaaaatcatccagttgcccgagtttttctgcgcgaagatatgcatagttgccaaaagttgctgtcattaacacgccaagaaaatagccttttccacttaacaatgggcaactgatccatagcccaaccagataaaccagcgccccgacaacaaataatagtttcgccacagtcttactggttttcataacgatctccatatctaccagcgatacattacgagtaaccaacgaaagacaaaactgaaaaatgccattaacaaatgattttcagaataaattcatactaaatattaattaattactgagatatatagatgtgaattatcccccacccggtcaggcaggggataacgtttacgccattaatggcagaagttgctgatagaggcgacggaacgtttctcgtcgtggctgataagcggcataacgctgcgcatctggtagatggctctgttctaacggtagttgcggcaacaattcaatgaggcttttctctggattcgccgcgatctgcgccagccttgctgcgcccagtgctggccccacatccccccccgtacggtaatcgagctgctgaccgctgatatccgccagcatctgacgccagtactcactacgcgccccgcccccaatcaacgtaacactttgcggtttaataccgcaggcatgcacgacatccatgccatctgccagcgcataacccacgccttccagcactgctcgcgccagttcattggggccatgttgatgagtcaaaccaaagaaaacccccttcgcctggggattattgtgtggcgtacgctcgccggaaagataaggcagaaaccaaactggctcggcactttcatcagcctgttgagctgcagcgattaaagctgggacattgctcaggccggttaatttcgcggcccaatccagacagctcgctgcactcagcatcacagacattaaatgccaacgttgcggtagcgcatggcaaaagctatgtacggcgctttctggcttgcttaagaacccttcgctgacagcaaaatagaccccgctcgtccccaggcttaacattgcctgattagcatcaaccattcccacaccaactgcaccagctgcattgtcgccaccgcctgcgacaactggcaccgtcgccataccccacgctttcgcaacttcaggtaacaaagcaccagtaatttcgctgccttcgtataatgcgggcatctggtcacgagataagtcgcaagcctgcagcatgacgtcactccagtcacgctttgcgacatccagccacatggtgccagctgcgtcagacatatcgctggcaaactcccccgtcatacgcagacgcaagtaatctttcggtaataatactttgtcgatttgacggaatatctccggctcatgccgctgaacccatagcaatttaggcgcagtaaatccgggcatcatcaggttgccggtaatcacccggctttgcggaactcgcgcttccagcaaagtgcactcttgcgcacagcgcccgtcgttccacaaaatggcagggcgtaacacccgttgctgagcatccagcaaggttgctccgtgcatctggccggcaatacccaatgctttaacgtcctgcagagaatgctgatcgcccagagctttcattgcgcgatcagttgcctgccaccactgttccgggtcttgttcgctccagagtggatgcgggcggctaacggtcagcttttccgtttgcgcagcaaccacctcaccctgctcgttgagcaaaataacttttacgccgctggtgccaagatctatcccgatatacatatcgatcgttccttaaaaaaatgcccggtatcgctaccgataaccgggccaacggactgcacagttagccgttatttgtcgaacagataatggtttaccagattttccagttgttcctggcgaccactctgatgcaccggagacaaatgatgttcctgagcatatttggctaaatctgccagactcatttggcctttcaggatttgctggcccaattcgctattccagccggaataacgctgcgcgatgcgtttatccagctcgccatcttcaatcatgcgcgctgcaattttcagcgccagtgccatcgtatccatcgcgccgatatgaccgtaaaacagatcatatttatcagtactttgacgacgtactttggcatcgaagttcagaccaccggtggtgaaaccgcctgctttgagaatttcatacatcaccagcgcattctcttccacactgttcgggaactggtcggtgtcccagcccagttgcgcatcgccacggttggcgtcgacagaaccgaacaggccaagcgcaatggcggtggctatttcatgatggaaagagtgacctgccagcgtcgcgtggttagcttcaatgttcagtttaatctctttttccagaccaaactgtttcaggaagccatagaccgtcgcggcatcgtaatcatattgatgtttggtcggttcttgcggtttcggttcgataagcaacgtgccctggaaaccgattttatgtttatgctcaaccaccatctgcataaagcggcccagttgttcacgctcctgacgcaagtcggtatttaacagcgtttcgtaaccttcacgaccgccccacaggacatagttttcaccgcccaatttatgggttgcttccatcgctgtaacaacttgcgttgccgcccagctgaagacttcaggatctgggttcgtcgccgcacccgcgccgtagcgagggtttgtaaagcagttggccgttccccacagcagcttcacgccgctctcttcttgcttgcctgccaggacatcaaccatttgcgcaaaattattgatgtactcttttaagctcgcgccctcaggggaaacatccacatcgtggaagcaataaaatggcacatgtaacttgtggaaaaactcaaatgcgacatctgctttacgcttcgccaacgccagtgcctcaccaggctgctgccacggacgattaaacgcccccacaccaaacatatccgccccgttccagcagaaggtgtgccagtagcaggcggcaaaacgcaagtgctcttccatacgcttacccaacaccagttcgtcgggattgtagtgacggaatgctaacgggttactggatttactgccttcataacgaacgcgatcgagctggtcaaaataggcttgcatattgaactccataatcaggtaatgccgcgggtgatggatgatgtcgtaatattgggcactccctttcagttgctcaattatgttatttcacactgctattgagataattcacaagtgtgcgctcgctcgcaaaataaaatggaatgatgaaactgggtaattcctcgaagagaaaaatgcaataagtacaattgcgcaacaaaagtaagatctcggtcataaatcaagaaataaaccaaaaatcgtaatcgaaagataaaaatctgtaattgttttcccctgtttagttgctaaaaattggttacgtttatcgcggtgattgttacttattaaaactgtcctctaactacagaaggccctacaccatgaaaataaagaacattctactcaccctttgcaccagtctcctgcttaccaacgttgctgcacacgccaaagaagtcaaaataggtatggcgattgatgatctccgtcttgaacgctggcaaaaagatcgagatatctttgtgaaaaaggcagaatctctcggcgcgaaagtatttgtacagtctgcaaatggcaatgaagaaacacaaatgagccagattgaaaacatgataaaccggggtgtcgatgttcttgtcattattccgtataacggtcaggtattaagtagcgttgtaaaagaagccaaacaagaaggcattaaagtattagcttacgaccgtatgattaacgatgcggatatcgatttttatatttctttcgataacgaaaaagtcggtgaactgcaggcaaaagccctggtcgatattgttccgcaaggtaattacttcctgatgggcggcagcccggtagataacaacgccaagctgttccgcgccggacaaatgaaagtgttaaaaccttacgttgattccggaaaaattaaagtcgttggtgaccaatgggttgatggctggttaccggaaaacgcattgaaaattatggaaaacgcgctaaccgccaataataacaaaattgatgctgtagttgccagtaacgatgccaccgcaggtggggcaattcaggcattaagcgcgcaaggtttaagtgggaaagtagcaatctccggccaggatgcggatctcgcaggtattaaacgtattgctgccggtacgcaaactatgacggtgtataaacctattacgttgttggcaaatactgccgcagaaattgccgttgagttgggcaatggtcaggaaccaaaagcagataccacactgaataatggcctgaaagatgtcccctcccgcctcctgacaccgatcgatgtgaataaaaacaacatcaaagatacggtaattaaagacggattccacaaagagagcgagctgtaagcgttacgccccagcgcggagcgggggcgtgatttctctccatgccgcgtgaatgaattggcttaggtggagtcgttatgccttatctacttgaaatgaagaacattaccaaaaccttcggcagtgtgaaggcgattgataacgtctgcttgcggttgaatgctggcgaaatcgtcagtctttgtggggaaaatgggtctggtaaaagtacgctgatgaaagtgctgtgtggtatttatccccatggctcctacgaaggcgaaattatttttgcgggagaagagattcaggcgagtcacatccgcgataccgaacgcaaaggtatcgccatcattcatcaggaattggccctggtgaaagaattgaccgtgctggaaaatatcttcctgggtaacgaaataacccacaatggcattatggattatgacctgatgacgctacgctgtcagaagctgctcgcacaggtcagtttatccattagtcctgatacccgcgttggcgatttagggcttgggcaacaacaactggttgaaattgccaaggcacttaataaacaggtgcgcttgttaattctcgatgaaccgacagccagtttaactgagcaggaaacgagcattttactggatattattcgcgatctacaacagcacggtatcgcctgtatttatattagccacaaactcaacgaagtcaaagcgatttccgatacgatttgcgttattcgcgacggacagcacattggtacgcgtgatgctgccggaatgagtgaagacgatattatcaccatgatggtcgggcgagagttaaccgcgctttaccctaatgaaccacataccaccggagatgaaatattacgtattgaacatctgacggcatggcatccggttaatcgtcatattaaacgagttaatgatgtcagcttttccctgaaacgtggcgaaatattgggtattgccggactcgttggtgccggacgtaccgagaccattcagtgcctgtttggtgtgtggcccggacaatgggaaggaaaaatttatattgatggcaaacaggtagatattcgtaactgtcagcaagccatcgcccaggggattgcgatggtccccgaagacagaaagcgcgacggcatcgttccggtaatggcggttggtaaaaatattaccctcgccgcactcaataaatttaccggtggcattagccagcttgatgacgcggcagagcaaaaatgtattctggaaagtatccagcaactcaaagttaaaacgagctcccccgaccttgctattggacgtttgagcggcggcaatcagcaaaaagcgatcctcgctcgctgtctgttacttaacccgcgcattctcattcttgatgaacccaccaggggtatcgatattggcgcgaaatacgagatctacaaattaattaaccaactcgtccagcagggtattgccgttattgtcatctcttccgaattacctgaagtgctcggccttagcgatcgtgtactggtgatgcatgaagggaaactaaaagccaacctgataaatcataacctgactcaggagcaggtgatggaagccgcattgaggagcgaacatcatgtcgaaaagcaatccgtctgaataacgcattgaggagcgaacatcatgagcaaaagcaatccgtctgaagtgaaattggccgtaccgacatccggtggcttctccgggctgaaaagtctgaatttgcaggtcttcgtgatgattgcagctatcatcgcaatcatgctgttctttacctggaccaccgatggtgcctacttaagcgcccgtaacgtctccaacctgttacgccagaccgcgattaccggcatcctcgcggtaggaatggtgttcgtcataatttctgctgaaatcgacctttccgtcggcagtatgatggggctgttaggtggcgtcgcggcgatttgtgacgtctggttaggctggcctttgccacttaccatcattgtgacgctggttctgggactgcttctcggtgcctggaacggatggtgggtcgcgtaccgtaaagtccctagttttattgtcaccctcgcgggcatgttggcatttcgcggcatactcattggcatcaccaacggcacgactgtatcccccaccagcgccgcgatgagtcaaattgggcaaagctatctccccgccagtaccggcttcatcattggcgcgcttggcttaatggcttttgttggttggcaatggcgcggaagaatgcgccgtcaggctttgggtttacagtctccggcctctaccgcagtagtcggtcgccaggctttaaccgctatcatcgtattaggcgcaatctggctgttgaatgattaccgtggcgttcccactcctgttctgctgctgacgttgctgttactcggcggaatgtttatggcaacgcggacggcatttggacgacgcatttatgccatcggcggcaatctggaagcagcacgtctctccgggattaacgttgaacgcaccaaacttgccgtgttcgcgattaacggattaatggtagccatcgccggattaatccttagttctcgacttggcgctggtagtccttctgcgggaaatatcgccgaactggacgcaattgcagcatgcgtgattggcggcaccagcctggctggcggtgtgggaagcgttgccggagcagtaatgggggcatttatcatggctagtctggataacggcatgagtatgatggatgtaccgaccttctggcagtatatcgttaaaggtgcgattctgttgctggcagtatggatggactccgcaaccaaacgccgttcttgattttgataaaaattttctcaaagccggttacgtattaccggttttgagtttttgcatgattcagcaggaaaagaaccatgtttactaaacgtcaccgcatcacattactgttcaatgccaataaagcctatgaccggcaggtagtagaaggcgtaggggaatatttacaggcgagtcaaagcgaatgggatattttcattgaagaagatttccgcgcccgcattgataaaatcaaggactggttaggagatggcgtcattgccgacttcgacgacaaacagatcgagcaagcgctggctgatgtcgacgtccccattgttggggttggcggcagctatcaccttgcagaaagttacccacccgttcattacattgccaccgataactatgcgctggttgaaagcgcatttttgcatttaaaagagaaaggcgttaaccgctttgctttttatggtcttccggaaagtagcggcaaacgttgggccactgagcgcgaatatgcatttcgtcagcttgtcgccgaagaaaagtatcgcggagtggtttatcaggggttagaaaccgcgccagagaactggcaacacgcgcaaaatcggctggcagactggctacaaacgctaccaccgcaaaccgggattattgccgttactgacgcccgagcgcggcatattctgcaagtatgtgaacatctacatattcccgtaccggaaaaattatgcgtgattggcatcgataacgaagaactgacccgctatctgagccgtgtcgccctttctagcgtcgctcagggcgcgcggcaaatgggctatcaggcggcaaaactgttgcatcgattattagataaagaagaaatgccgctacagcgaattttggtcccaccagttcgcgtcattgaacggcgcagtacagattatcgcagcctgaccgatcccgccgttattcaggccatgcattacattcgtaatcacgcctgtaaagggattaaagtggatcaggtactggatgcggtcgggatcagccgctccaatcttgagaagcgttttaaagaagaggtgggtgaaaccatccatgccatgattcatgccgagaagctggagaaagcgcgcagtctgctgattagtaccaccttgagcatcaatgagataagccaaatgtgcggttatccaagcctgcaatatttctactctgtttttaaaaaagcatatgacacgacgccaaaagagtatcgcgatgtaaatagcgaggtcatgttgtaacgatgatgagaattgtcggcgtcacatcaggtaacgctgcgtggttgtcggatgcggcgtgaacgccttatccgacctacccgccaggcatgataaaacgcaccaacaacgcttcaggctcgtagctcaactgcctgagacaaagtaaaaagccttatccgactgacaagtcggataaggctcaaggaaatgcaattacatatgcgccgcgattaaccgttggttatcctggtacattgcgaacaggtagttgttataactcttccctttggtgctgtagcccttcagcttgtgaatcatcgctgtggcagtcacttcctgatccgctttacgcagctgcgcacggcttttacggaagctagagtaagccgggtgcgtattcaggttagtgacataggcgctcacgctttctttgacagaactaaactgactgtaccctttcactttacctggcgcattggtacaacgtcctttcatgcatttcatgccgaacaggttgttgttgttgcgcgccagcttgctcgttccccaaccgctttctgctgcagccatcgtcgccaccatactggtggggataatgtctacgcgttcaagcaaggtattccacgggatttttcgcgtattaccggaccacttcaccttgtagcgtttggcgatgtctttcagacgcgcacgctcagcaggactccattggccctgatactgtttactaatgagccagttacgttccgcagtaatggccgcattttggctggtaatgtaaggcattacggtccggagaaacgcctttttccttggtgttccggaagggtattttcgcaaatcaggaagactactactctttgcactattgcgagaatactcttgtttactgcttacctgtttattactagctttagttaagtgggacttttgactcgctgttgttgtgtgcgtcttcgctaacacctcactgctaaacaccagagtgagtaacataagaatcatcgccccatatcgtcgtatgggagtcaaaatcatcaggtctcctggtcggatttaatcattccaacaccttatatttttcacaaatttgagagttgaatctcaaatcatatcaaaaatagctgtcaagagcaccccaaggaatagtccaaatctgaaactatgtcacgtgttaacgattcagattggcgctaaatcgcagaaaatgtgggggttatcgcaaaattcagccgttttttgcgcgagatcgctcacccttgcttctcatcctgtggacttaccgctcagggatgagttttgtttggcttatcgctggcaaactgtctgaaatcgcagcaataaggactcatccgccatgaaactcgccgcctgttttctgacactccttcctggcttcgccgttgccgccagctggacttctccggggtttcccgcctttagcgaacaggggacaggaacatttgtcagccacgcgcagttgcccaaaggtacgcgtccactaacgctaaattttgaccaacagtgctggcagcctgcggatgcgataaaactcaatcagatgctttccctgcaaccttgtagcaacacgccgcctcaatggcgattgttcagggacggcgaatatacgctgcaaatagacacccgctccggtacgccaacattgatgatttccatccagaacgccgccgaaccggtagcaagcctggtccgtgaatgcccgaaatgggatggattaccgctcacagtggatgtcagcgccactttcccggaaggagccgccgtacgggattattacagccagcaaattgcgatagtgaagaacggtcaaataatgttacaacccgctgccaccagcaacggtttactcctgctggaacgggcagaaactgacacatccgcccctttcgactggcataacgccacggtttactttgtgctgacagatcgtttcgaaaacggcgatcccagtaatgaccagagttacggacgtcataaagacggtatggcggaaattggcacttttcacggcggcgatttacgcggcctgaccaacaaactggattacctccagcagttgggcgttaatgctttatggataagcgccccatttgagcaaattcacggctgggtcggcggcggtacaaaaggcgatttcccgcattatgcctaccacggttattacacacaggactggacgaatcttgatgccaatatgggcaacgaagccgatctacggacgctggttgatagcgcacatcagcgcggtattcgtattctctttgatgtcgtgatgaaccacaccggctatgccacgctggcggatatgcaggagtatcagtttggcgcgttatatctttctggtgacgaagtgaaaaaaagcctgggtgaacgctggagcgactggaaacctgccgccgggcaaacctggcatagctttaacgattacattaatttcagcgacaaaacaggctgggataaatggtggggaaaaaactggatcagaacggatatcggcgattacgacaatcctggattcgacgatctcactatgagcctagcctttttgccggatatcaaaaccgaaagtactaccgcttctggtctgccggtgttctataaaaacaaaatggatacccacgccaaagccattgacggctatacgccgcgcgattacttaacccactggttaagtcagtgggtccgcgactatgggattgatggttttcgggtcgataccgccaaacatgttgagttgcccgcctggcagcaactgaaaaccgaagccagcgccgcgcttcgcgaatggaaaaaagctaaccccgacaaagcattagatgacaaacctttctggatgaccggtgaagcctggggccacggcgtgatgcaaagtgactactatcgccacggcttcgatgcgatgatcaatttcgattatcaggagcaggcggcgaaagcagtcgactgtctggcgcagatggatacgacctggcagcaaatggcggagaaattgcagggtttcaacgtgttgagctacctcagcagccatgatacccgcctgttccgtgaagggggcgacaaagcagcagagttattactattagcgccaggcgcggtacaaatcttttatggtgatgaatccagccgtccgttcggtcctacaggttctgatccgctgcaaggtacacgtagcgatatgaactggcaggatgttagcggtaaatctgccgccagcgtcgcgcactggcagaaaatcagccagttccgcgcccgccatcccgcaattggcgcgggcaaacaaacgacacttttgctgaagcagggctacggctttgttcgtgagcatggcgacgataaagtgctggtcgtctgggcagggcaacagtaacttttccggcttcccgttcgtcagtacctcgggaagccgccaaccaggataaaatgtcagccctaatcagcgttgcaggataaagcaccgctcactcttcaacagaccgatttgcaccccagcaaatgtagcgttattgttaccttccttgctacagagttcgacagatatcccgctatgacattctccctttttggtgacaaatttacccgccactccggcattacgctgttgatggaagatctgaacgacggtttacgcacgcctggcgcgattatgctcggcggcggtaatccggcgcagatcccggaaatgcaggactacttccagacgctactgaccgacatgctggaaagtggcaaagcgactgatgcactgtgtaactacgacggtccacaggggaaaacggagctactcacactgcttgccggaatgctgcgcgagaagttgggttgggatatcgaaccacagaatattgcactaacaaacggcagccagagcgcgtttttctacttatttaacctgtttgccggacgccgtgccgatggtcgggtcaaaaaagtgctgttcccgcttgcaccggaatacattggctatgctgacgccggactggaagaagatctgtttgtctctgcgcgtccgaatattgaactgctgccggaaggccagtttaaataccacgtcgattttgagcatctgcatattggcgaagaaaccgggatgatttgcgtctcccggccgacgaatccaacaggcaatgtgattactgacgaagagttgctgaagcttgacgcgctggcgaatcaacacggcattccgctggtgattgataacgcttatggcgtcccgttcccgggtatcatcttcagtgaagcgcgcccgctatggaatccgaatatcgtgctgtgcatgagtctttccaagctgggtctacctggctcccgctgcggcattatcatcgccaatgaaaaaatcatcaccgccatcaccaatatgaacggcattatcagcctggcacctggcggtattggtccggcgatgatgtgtgaaatgattaagcgtaacgatctgctgcgcctgtctgaaacagtcatcaaaccgttttactaccagcgtgttcaggaaactatcgccatcattcgccgctatttaccggaaaatcgctgcctgattcataaaccggaaggagccattttcctctggctatggtttaaggatttgcccattacgaccaagcagctctatcagcgcctgaaagcacgcggcgtgctgatggtgccggggcacaacttcttcccagggctggataaaccgtggccgcatacgcatcaatgtatgcgcatgaactacgtaccagagccggagaaaattgaggcgggggtgaagattctggcggaagagatagaaagagcctgggctgaaagtcactaaaaattgcctgatgcgctacgcttatcaggcctacatgatttctgcaatatattgaatttggaagaatttgtaggccggataaggcgtttacgccgcatctggcataaacaaagcgcactgttccggcgttgagaaacgccggaaaacgtttcaaacaggctgctgccgtagccgatgccgctgcactttctcgacatccatgcactgcaacgcctttgtcgggcaggcttcaacacaggccggtcccgtctcccgatgccagcacagatcgcacttaatcgccctcgcctttttgcggctagaaacgacctccatcgcaccaaacgggcaagccagcatacagcttttacagccaatgcaacgtgtttgttcaacgaaaatatgcccatgttcgcggcttatcgcgtcaacagggcagacattcgcgcacggtgcatcttcacactgatgacaggctactgccgtggtccagcagtggtctttaatgacgaatacgggaaataaacacacgaatacgggaaataaactcgtctggactcaacgcagcgcaatcctgattctcatgatggctcactgcgcaagccacttcacaggtacggcaaccgatacatttcgtcgcatccgcaataataaaccggttcatgatcactcctttgcactaaaacagcagagtgccagagagcgcgtccctactgctttgatccaacgaaggaaatgttaaagttttggcacttgtccaaagcgttatgtgatcgcgcccaggtcatccctgacagtaaatcccagttcattagaaatagcctgcgcggtttcacgcagtggtttcaggagatttttctctcccacctgtttcagacgacttgtgctaaggctaatgctcacggcgtacggcacccgcccatgaatatcaaacaccggaacagcaatacaggagacgccgagttcgttttcttctctgtccatcgccgctccgctttcacgaatgtgcgccagttcgtcgaacatcgcgggcagctcggtaatggtattgcgggttaacggctggatctcatgctgatggctttcccagtaactcttcacgtagtccgggtgaccaaacgccatgtagatcttgcccattgcggaacagtagagcggcatatgctggccaatataggcacgggttcgcagcatcccggttgtgggttccagcttataaatcaaaatagcgtgatcgtcttcgcggctggagaagttaatggtttcaccagtggcgatgttcagtgcctcaagatgcggagcggcgatatgaatgatattcaggctagacagcgccttctgcccgacggcaataaatttggtggtcaggcgataactccctgcggcaggcgcggtggtcacatagccgcaggactgtaatccctgcaataagcgatggacggtactcttatttaaaccagccagctcgctaagatgcgccaacggacaaccgtttggatagttgctcaaaatctcaatcagcatcaacccgcgaaacagactctggcttccggctggacgctctttttcctgcgccatctcgttctctttttttcccatcacttctttccccattttgtcgcgtcctgatggtagcgcaaagtgtgccgtagttcacgatctcgacagataatttataaccaattgatttttatgtcttttgaaattcatcaatcagattgccttgttaaaaagtgatcgatatatttgaaatcaagtttcgcatattgaaattttaagccaaaaaagcgatcaaaaaaacaaggaagcctgggatgaaagtgacatttgagcagttaaaagcagcctttaatcgggtcttaattagtcgcggcgttgacagcgaaacggctgacgcctgtgcagagatgttcgcccgcaccaccgaatccggcgtttattctcacggcgttaatcgtttccctcgtttcattcaacaactggaaaacggcgatatcattcctgatgcccaacccaaacgtataaccagcctcggcgcaattgaacagtgggacgcccagcgtagcatcggtaacctgacagcgaaaaagatgatggatcgcgccattgaactggctgccgatcacggtattggtctggtggcactacgtaatgccaaccactggatgcgcggcggcagctacggctggcaggcggcggaaaaaggctatattggcatttgctggaccaactccatcgccgtaatgccgccgtggggcgcaaaagagtgtcgcataggcactaacccgctgatcgtcgccattccttccacgccgatcaccatggtcgatatgagcatgagcatgttctcttacggcatgttagaagttaaccgtctggcaggtcgtcagctcccggtcgatggtggctttgatgatgagggcaatttgaccaaagaacctggcgttatcgagaagaatcgccgcattttgccgatgggctactggaaaggttctggcatgagcattgtgctggatatgatcgctactctcctttccgacggcgcatccgttgccgaagtcacccaggacaacagcgacgaatacggcattagtcaaatttttattgccattgaagtggacaagcttatcgacggtcccacccgcgatgccaagctgcaacgcatcatggattacgttactagtgccgagcgtgctgacgaaaatcaggccattcgcttacccggccatgaatttactaccctgctggccgaaaaccgccgtaacggcatcactgttgatgacagcgtgtgggccaaaatccaggcgttatgaggagataagtcatgatttttggacatatcgcgcagcccaatccgtgccgtttgcccgccgccattgaaaaggcgctcgattttctgcgcgctaccgatttcaacgccctggagccgggcgttgtcgaaatcgacggcaaaaatatttatacgcaaattatcgatttaaccacacgcgaagcggtggtaaaccgtccggaagtgcatcgtcggtatatcgatattcagtttctggcgtggggcgaagagaaaatcggcattgctattgatacgggaaataataaagtcagcgaaagtctattagagcagcgcaatattattttttatcacgacagtgaacatgaaagttttatagaaatgataccgggcagctacgcaattttctttccgcaggatgttcaccgaccaggttgtattatgcaaacagcctctgagatacgaaaaattgtggttaaagtcgcattaacggcgctgaattaatcgaataatcgtctacgccagaacgcctgggtaatgttattgctctaactatattaataattcaggttgctgcacatgcgacttgaattatgacagacatagcctcaaggaatagctatgaaaaaaatactcgaagcaatactggcgattaatctcgccgtactttcctgtattgtatttataaacattattttaagatatggttttcagacaagcattttatctgttgatgaattgagtcgttatttatttgtctggttaacgtttattggcgcgattgtagcttttatggataacgcccacgttcaggtcacctttctggtggagaaactctcccccgcatggcagcgacgagtcgctctggttacccattccttaatcttatttatttgtggcgcactggcctggggcgcaacgctaaaaacaattcaggactggagcgattatagtccgatcctcggtttacccatcggcctgatgtatgccgcttgtctgcccaccagcctcgttatcgcattctttgaactgcgtcatttatatcaactcatcacgcgtagcaattctctaacgagcccaccgcaaggagcttaatcatggctgtgctgatttttctgggctgtctgttgggtggtattgctatcggtttgcctattgcctgggcactgttgttgtgcggggcggcgttaatgttctggctggacatgtttgatgtccagatcatggcacaaacgctggtgaacggagccgatagcttctccctgctggcgattccgttctttgtgctggcgggtgaaatcatgaatgcgggcggcttgagtaaacgcattgttgacctgccgatgaaactggtggggcataaaccaggcgggctgggctacgtcggcgtgctggcagctatgattatggcgagcctttctggttctgccgttgcggataccgccgccgttgccgctctactggtgccgatgatgcgcagcgccaactatccggtcaaccgggcggcggggctgattgcctctggcggcattatcgcgccaattattcccccttccattccgtttattatcttcggcgtttccagcggattatccatcagtaagctgtttatggcgggcattgcccctggcatgatgatgggcgcaacgctgatgcttacctggtggtggcaggccagtcgccttaatttaccccgccagcaaaaagcaacgatgcaggaaatctggcactcttttgtctccggtatctgggcgctgtttcttccagtcatcattattggcgggtttcgctccggcctgtttacccctaccgaagccggggccgttgctgctttctatgcgctgtttgtcgccacagttatttaccgtgaaatgaccttcgccacactttggcatgtactcattggcgcggcgaaaaccaccagtgtggttatgtttctggtggccagcgcacaagtttccgcctggctgattaccattgctgaactgccgatgatggtttctgatttactgcaaccgttggtcgatagtccgcgtctgctgtttatcgtcattatggtggctatcctgattgtcggcatggtcatggatttaacgccgacggtattaattcttaccccggtattaatgcctttagttaaagaggcaggaatcgatccgatttatttcggtgtcatgtttatcattaactgcagtatcggcttaattacaccgcctatcggtaatgtacttaacgttattagtggggtggcaaaactcaaattcgatgatgcagtcagaggcgttttcccttacgtcctggttttatatagtttattagtcgtatttgtttttattcccgatctcatcatcctccctttgaaatggattaattaaaaggaaaatattatgaaattacgctctgtaacctacgcattattcattgctggcctggctgcattcagcacatcttctctggcggcacaatctttacgtttcggttatgaaacaagtcaaaccgacagccaacatattgcggcgaaaaaattcaatgatttattgcaggagagaaccaaaggcgagctgaaattaaaactgttcccggacagcactctcggtaacgcgcaggcgatgatcagcggcgtacgtggcggcaccatcgatatggaaatgtccggcagcaataactttgccgggttaagtccagtgatgaacttgcttgatgtccctttcctgttccgcgataccgctcacgcgcataaaacgctcgacggcaaagtcggtgatgatctgaaagccagtcttgaaggtaaaggactgaaagtactggcctactgggaaaacggctggcgcgatgtcaccaacagccgcgcaccggttaaaacccccgccgacctgaaagggctgaaaatccgcaccaacaatagcccgatgaatatcgccgcattcaaagtctttggcgctaacccgatcccgatgccgtttgccgaagtctataccgggctggaaacccgcactatcgacgctcaggaacacccgatcaacgtcgtctggagtgcaaaatttttcgaagtgcagaagttcctttctctgacgcaccacgcctattccccgcttctggtggtgatcaacaaagcgaagtttgatggcttaagtccggagttccagcaggcgctagttagttctgcacaagaagcgggtaactatcagcgcaaactggttgctgaagatcagcaaaaaatcatcgacggcatgaaagaagcgggcgtggaagtcatcaccgatctcgaccgcaaagcctttagcgacgcactggggaatcaggttcgcgacatgtttgttaaagatgtgccgcagggagctgatctgctgaaagccgtggatgaggtgcaataaaccatgacgcaatactggctggggttagattgtggcggtagctggctgaaagccgggctgtatgaccgcgaaggccgggaggcaggcgtgcagcgcctgccgctgtgcgcattaagcccgcagccaggctgggcagagcgcgatatggcagaactgtggcaatgctgcatggctgtcattcgcgccctgcttactcattctggtgttagcggggaacaaattgtcggtatcggcatctccgcacagggaaagggcttgtttttgctggataaaaacgacaaaccgctcgggaatgctattttgtccagcgaccgccgggcgatggaaatcgttcgtcgctggcaggaagatggcatcccggaaaaactctacccgctgacccgacaaaccttgtggaccgggcatccggtgagcctgttacgctggctgaaagagcacgaaccagaacgctacgcgcaaattggctgcgtgatgatgacgcacgactacctgcgctggtgtttaactggcgtcaaaggctgtgaagagagcaatatttccgagtccaacctctacaacatgagtcttggggaatatgacccgtgcctcaccgactggctggggatcgctgaaatcaatcacgccctgccgcctgttgtcggatctgccgaaatctgcggggagatcaccgctcagacagccgccctgaccggtctgaaagcgggtacgcccgttgttggcggcctgtttgatgtggtttccaccgcactctgcgccgggatcgaagacgaatttaccctcaatgcggtgatggggacctgggcggtgaccagcggcataacccgcggtttacgtgacggtgaagcgcatccgtatgtctatggtcgctacgttaacgatggtgaatttatcgttcacgaagccagccctacctcttccggcaacctcgaatggtttaccgcacagtggggagaaatcagctttgatgagatcaatcaggccgttgccagcttgccgaaggctgggggcgatctctttttcctgccgttcctgtacggcagcaacgccggactcgagatgaccagtggtttctacgggatgcaggccattcacacccgcgcgcacctgttgcaggccatctatgaaggggtggtgttcagccatatgacccacctcaaccgaatgcgcgaacgttttactgatgttcacaccctacgcgtcactggcggcccggcgcactccgatgtctggatgcaaatgctggcggacgtcagcggtctgcgtatcgagctgccgcaggtggaagaaaccggctgctttggtgcggcccttgccgcccgcgtcggcaccggggtttatcacaacttcagcgaagcccaacgtgacttgcgacacccggtgcgcaccctgctgccagatatgaccgcccatcagctttaccaaaaaaaatatcaacgttatcagcatctcattgccgcacttcagggctttcacgcccgcattaaggagcacacattatgagccgaccacttctgcaactggccctcgaccacagtagtcttgaagccgcgcagcgcgacgtgacgctgttaaaagacagcgtcgatatcgtcgaagcgggcaccattctctgtttaaacgaagggcttggcgcggtgaaagccttgcgcgaacagtgcccggacaaaatcatcgttgctgactggaaggtcgccgacgctggtgaaacgctcgcgcaacaggcgtttggcgcaggcgctaactggatgaccatcatctgcgccgcgccgctcgcgacggtagaaaaaggccacgcaatggcacaacgctgcgggggtgaaattcagatagagctgttcggtaactggacgctggacgacgcccgcgactggcatcgtattggcgtgcggcaggccatttatcatcgcggtcgtgatgcacaggccagcgggcaacagtggggcgaagccgatctggcacgcatgaaggcgcttagtgatatcggccttgagctttccattactggcgggattacccctgctgacctgccgctgtttaaagatatccgcgtgaaagcgtttattgccgggcgggcactggcaggcgcggcaaatccggcgcaagtggctggcgatttccatgcgcaaatcgacgctatctggggaggtgcgcgtgcgtaatcatcagttagggatttatgaaaaagcgctggcgaaagatctctcctggccggagcggctggtgctggcaaaaagctgcggttttgattttgtcgaaatgagcgtggatgaaaccgacgaacggctcagtcgtcttgactggagcgccgcacaaaggactagcctggttgccgcgatgatcgaaacaggtgttgggatcccgagcatgtgcctgtccgcacatcgtcgctttccctttggtagccgtgacgaggcagtgcgcgaacgggcgcgggaaatcatgagtaaagcgattcgcctggcgcgcgatctcggcattcgcaccatccagctggcaggttatgacgtctattacgaagaccacgacgaaggcacccggcaacgttttgctgaagggctggcgtgggcagtcgaacaggcggcggcaagtcaagtaatgctggcggtggagattatggataccgcgtttatgaactccatcagcaaatggaaaaaatgggacgagatgctcgccagtccgtggttcaccgtctacccggacgtcggcaacctcagcgcctggggcaatgatgttcccgccgaactgaaactgggcattgaccgtatcgccgcgatccacctgaaagacacccagccagtcaccgggcaaagtcccggacagttccgcgacgtgccgtttggcgaaggctgcgtcgatttcgttggcatcttcaaaacgctgcataaactgaactatcgcggttctttcctgattgagatgtggaccgaaaaagccaaagagccggtgctggagattattcaggcgcggcgttggattgaagcgcgtatgcaggaggctggatttatatgttaacgtaaatgcaggaggctggatttatatgttagagcaactgaaagccgacgtgctggcggcgaatctggcgcttcccgctcaccatctggtgacgttcacctggggcaatgtcagcgcggtagacgaaacgcggcaatggatggtaatcaaaccttccggcgtcgagtacgacgtgatgaccgccgacgatatggtggtggttgagatagccagcggtaaggtggtggaaggcagcaaaaaaccctcttccgatacaccaacgcatctggcgctctaccgtcgctatgccgaaattggcggtattgtgcatacccacagccgccacgccaccatctggagtcaggccgggctggatctccccgcctggggcaccacccacgccgattatttttacggtgccatcccctgcacgcgacagatgaccgcagaggagattaacggcgaatatgaatatcagaccggcgaagtgatcattgaaaccttcgaagaacgtggcaggagtccggcacaaatcccggcggtgctggtgcattctcacggcccgttcgcatggggtaaaaacgccgccgatgccgtgcataacgccgtagtactcgaagaatgcgcctatatgggtctattcagccgccagcttgcgccgcagctccctgcgatgcaaaacgaactgctggataagcactacctgcgtaagcatggggccaatgcctattacgggcagtaatccctcacgccggggcttcatcgccccggcactacgaattgatatgttccttgctgtaacgccgcttccacgctgctggcgttaaaccagtatgtttctgaaaaatctgccggaaatagccaacgtcattaaaccgtattgcatggagcaggccgacaacgtcgagtcactgcataacctgttgctgcccgccgatgcgccatttacgacatttgaaggcaagggattgttcagccataagatcctgattcagacgccaggttcccggtatgaacagagcaatccagagcaacaacctttgtggcattacgacggagcaccagccgcaccgacatccaccggtgaattaaaaacgccagctcaccccggtgacaaaggtaaaactctcattacgatcaatcatcgggctgtcggtaatctcttccggcagctcgctgtatcctgcgctcgccatcaatacgacgtgctctcctatcgggtattttgccgtcaggctgacatagggcacccaggcatcctgcgcggaataacttgccagaccgctacgacgggactcactctcactaatgccatagtaatagtcactgaaattctcgtcataatagagaacgcccagcgcaggtgtcaggctcagacgacctatccgcattttgtggaatacgcttagctcccccacccagccgttgctgttatccagaacgtccgcagctgcagaggctttcacggttccccaacgctcgtggtgataccaggcaacccccgccatagccgtactatcacgcttatcaagctgttgcatggcataatcgtcattatcggtagggtcaaattccagcggcatccaggatgcggtcaggctaagttcatttttttcactttggctcagaataaaacctaacgtggtctgacgaacataaaaagtatcaccttcataactaatcagcggaattgccttcgtattttcattataaccgcgataagggctttcattataagccgcaccagcaccaatggataattcagaagcagttgcgcttgccataaaaggcaacgcaaataacgccacaatattgcgattaattaacatgtccggtattccattttaaaataagataaaaaagagtcggcataataatgcttacaatttctccggtgcaagattcatatttatatagtaatatataaaattatatataattgggctgttgcgatgacaaaattacaacttaagtaccgggagttaaaaattatcagcgtaatcgctgccagtgaaaatatcagccatgccgcgactgtacttggcatcgcacaggccaacgtcagcaaatatcttgctgattttgaaagtaaagtgggtttaaaagtccttgaccgaaccacccggcagctgatgctcacaccttttggcaccgcgctgttaccgtacatcaacgacatgctggacagaaacgagcaacttaataattttattgcagattataagcatgagaaacgtggtcgggtcaccatctacgccccaaccggcataattacctatttatccaaacatgtaatcgataaaattaaagatatcggtgatatcaccttaagcctaaaaacctgcaatcttgagcgtaatgccttttatgaaggcgtcgaatttcctgatgattgtgatgttttaatcagctacgctccaccaaaagatgaaagcctggttgccagttttattacccaatatgccgtaaccgcttatgccagccagcgctatcttgagaaacatcccattagccgtcctgacgaactcgaacatcactcctgtattttgatcgacagcatgatgatcgacgacgcgaatatctggcgcttcaacgtcgccgggagtaaagaggtgcgggattatcgcgtgaagggaaattacgtttgcgacaacacgcaatctgcgctggagctggcacgaaatcacctggggattgtgtttgcgccagacaaaagtgtgcagagcgacctgcaagacggcacgctggtgccctgctttcagcaaccctatgaatggtggctggatctggtggctatcttccgtaaacgggaataccagccctggcgggtccagtatgtgctggatgaaatgctgcgtgaaattcgccaccagcttgctcagagccagcaactgcggcctgaacaagcggcggaaagcgaagattaatgatcgagataaaggtaatgcacccagctggtcatgcgtaatagcactttgcgcatcacgctgacatggctgaaatgatcagagtaaaccgccacctgggcgtaaataccgtctggtaaagcgctcaaatcagtgtgctcatccagttcaatggtcgcgataacgccatcactacccggcgctgtgtttaacgtctgtaaggtgccggtgctctgataagctccgccgggaacggctggactaatggctgccagcttaccgctgaataccttacctggcagagcattaaacaccacttccgcatcgtcgccaggagccagtcgcagcaaggagttctgacggaactgcgccacgatttgtcgtttctgatcgggtataaacaccatcaccggacgtagcggcaggctcgcggcataggtacccggacgaatcagtacctgggtcacataaccatcgctcggcgcacgcactatcgtctgctcaaggttatattttgcttccgcgagctgtgctttcaggctggcgatttgagaatgttcacccaacaccaggctatccagctggctctggatctgtttttgttccgccgcgctactcttcacggaggcttcctgcgccagataattttgccgcgccacatcgatatcgcgttcactaaacgggtttactttcgcctggctgccacgtgcgtaacgctgatactctttagcgaatttatcccgcgtggcctttgcctgctgagtattcgccgccatctcatctaactctgcgcccaacgcccgctgtttatgttctgcggtaacgatatccgccatcagccgatccacccgcgcctgataacgcgtcgggtccagtcgaaatagcacctcaccttttttaatcagcgtatttttcttatccgtcacttcaatcaccacaccagtcacctgtgggacaacaggaatagaaataaccgctttttgcgctttaaaggtatacggatggttatagttcattaacagaattagaccgctgacaataaatattccacccagggccgctgtgggaatggtccatttatttacgggaattttgaagatcttaaacattgcccatgcaaaagccacataggtcaaaataatcagtaaatccataagtattactcggcagaagaggatttgatgtcggcgagctgtttctccagcccggcaatgcgctgttgcagttgcataacggaactatcatggctttgcattccccatccccgctccgggcggtaaagcgtggcccaaatccacaaaaacggccagataacatgtaacgtaaaaagactcacccaaccagcaacatgaatggcgtcggcatgaggatgattacgttttttggcaatcaggtagggaatatcatgtaaaataatgatcccatagaagatcaccagaaatacaaaaataagcactcccagtgcaaaatagtccaggaacatatttccctcaaagaatataaaaaagaacaattaacgcatattatgaaatgccatgatgcagtgcaatttccttatttatataacgacatattgttttttatatactttcttaaatgtgctgtctggtttttcaacaggacgaggtttatcatattgaaatagtggaactattggccaaactaatgaataactccagtaaaacatccacagtacagattaagcgtattaaaccttcaattatctaccgtttattgctgattggcctcggatcaccaatggtgatttacggcctggttcgcccgctcaccatcgaaacgcgagattaaactcctgacaaaacacgccccagaaacgtacttctgttggcgtagtctgggttattgcgcacgtaggtttaaaacgtaaattgtaacaacgtgcgctttgtttatgccggatgcggcgtgtacgccttatccggcctacggtcaggttcccgtaggcatgataagacgcgtaagcgtcgcatcaggcaatgaatacccaatgcgaccagcttcttatatcagaacagccccaacggtttatcgctgtagctcaccagcaggcacttggtttgctggtaatgctccagcatcatcttgtgggtttcgcgaccgataccactttgtttgtagccaccaaacgccgcatgtgccgggtaagcgtgataacagttggtccacacgcgcccagcctgtatgccgcgccccatcttataggccagattaccgttgcggctccagacgcccgcgcccaggccatattgcgtatcgttcgccagctccagcgcttcttccatcgttttgaaggtggtcaccgccagcaccgggccaaaaatctcctcctggaacacccgcatattgttctgaccaaacagaatcgtcggttcgaggtagtagccgtctttcagttcaccttccagcagcttgcgccgcccgcctgtgagcacgtcagcgccctcttttttaccgatatcaatgtagttgaggatggtttccagttgcccgtgagaaacctgcgcgcccatttgcgtcacgctgtcgagcgggttaccgctacgaatgctttcgacacggcggatggcgcgttccataaagcgttcgtagatagattcctgcactaaagcacgactcggacaggtgcaaacttcgccctggttaaaggcaaacagtgcaaagccttccagcgctttatcgaaaaaggcatcttcttcatccatcacatcagcaaagaagatatttgggctcttaccgcccaactccagcgtcaccggaataatgttttgcgttgcgtattgcataatttgttggcccacttccgtactgccggtaaacgccactttggcgatgcgtttgctggtcgccagatattcgccaattaccccacctgcgccattgaccacgttcaccacgcccggcggcagtaaatcaccgacaatttccattagcagcagtacagaaagcggggtaagacgtgcgggtttcagcaccacacagttgcccgccgccagcgcgggagccattttccagctcgccatcagcagcgggaagttccacgggataatctgccccaccacgcctaacggttcatggaaatgataggccacggtttcgctatcaacttcactgatcccaccttcctgcgcccgaatacagctggcgaaatagcggaaatggtcaatcgccagcggtacatccgcagcactggtttcgcgaatgggtttgccgttatcccaggtttcagctgtcgctaacagctcgaggttttgttccattcgatcggcaatcttaaacagaatcgccgcacgatcctgcacgctggtgtgcgcccatttatctttcactttgtgcgcagcatccagcgccagatcgatgtctcgtttgccgctagacgccacttcgcacagcagctgcccggtcaccggcgtcagattctggtaatactcgccgtcggcaggggctacccattcgccgccaataaagttgtcatagcgggcttttaacttgagggggaaaccatactcgccgggcttaatctgtgcactagggggattattggtcatgatcgtctccttgcggtgtgaggtataacaagggtagacgtgactggcgaaatcttcgccagtcggtaacagctttacgacagctatcacgaatttacgggcaagggttacagagatagttgaaaaagcggctaacaatttgccagccgttgtggaaatgatgattacatcgctgcgcgataaatcgccacaatttcttcgtgagttgcctggatcgggttagtaaagccacaggcatctttcagggcattagtcgccaataccgcgaaatcttcttctttcacgttcaggtcgcgtaggcctgccgggatatccactttcttcgccagttcacggatggcgttaatgcaggcttcagcaccttccgcgtcgtttttacctgtcacgttcacgcccattgcagcggcacagtcacgcagacgtgcagcggcgactttgctgttgaatacctgaacgtgcggcagcaaaacggcgttacatacaccgtgtggcaggttgtagaaaccgcccagctggtgcgccatcgcatgaacataacccagagaagcattattgaacgccataccggcgaggaactgggcataagccattgcttcacgcgctttcgcattactgccatcttcaacggctaacggcaggttttcggcaatcatggtcacggctttcagtgcacaagcgtcagtgatcggcgtggcggcaatagaaacatatgcttcgatagcgtgcgttaaggcatccatacccgttgcggcggtcagactcttcggcataccaatcatcagagaggagtcattgacagaaagcagcggagtgacatgtttatcaacaatcgccattttgatatgacgcgcttcgtcagtgatgatgcagaaacgggtcatttcagaggccgtacccgccgtggtattgatggcgatcatcggcagctgcggttttgcagagcggtcaacgccttcgtaatcgcgaatatcgccgccattggctgccaccagcgcaataccttttgcgcagtcgtgtggagaaccaccgcctaaggagatcacgctatcgcaattattctctttaagtaatttcaaacctgcggcgacgttttccgtggtggggttaggttgggtgccatcataaataacgctaaaaatattgcgttcttccagtgctttttgcacatcgcccgccatacctaatttcgttaacatattgtcagtgacaattaaggtacgggtaaatccataatctgccatcatattcattgcatcagtcaaactatcagcgccgatgacattcacagaaggaataaagaacgtactagctgccataacacactcctgaaagtgtaaaaaagggcgggcagcttactgaggattttcattcgaaaatatgatcagtattattgattatcaaaattaatctaataaaaagcacattgtattcattaaacaatgtgctttttttaaattcataagaattttgtattaatttattttaaaacttaattaatcatttccttatttttccggaaataataatgcgtcgcgcaataaatgatcatttccacgacgacgcgtaaagccaatgcggtcaaaatattccagaatctgaattgccagctttcggcctacgcctaagcgatcgcggaaatccgccgcgcaggtactaccacactcctgatcgagatcgcggatcatattggcaaactcgacaatccgatcgttacggtaataacgatctttaacgatcgcggtaattattccttgctgcgccgcctggcgtagagtcaggcgcattgcctgctcgtcggttcccgtctcttttgccaggtcacgcacccaccacggttcgtcaccaaacagtggctctgctttttgccagatggcctgctgctcttcgctgaagcccgctttgtgatctggcagatgcagccagccgtgatggctgtggatgtcgccgctttcgcgcatcttttcaatcagcaacagtaccagcgcttcatcttccattggcaacgccatacgtcgcagacgttcgcgcccagggccaggttcatcgcgatgttgctcatgataagtcgctaatgtgtcgagaattttccgctgccagcgggcggcaaccggcgcattcaacaagctataaccagcctgaatataaccaggctgttgcagcaattcgcgcatcccttcgccgttgagctggcgcgcccaggcgaaatccgcaaggttaaccgcgccgcgttccagatgaacagataacgcatcggcatcgctctgcgcccgtgcaagagacgccagccattgcagatattccggcttacgtttaccgcgacgcggcgggttaagcatcacgacgcgcgctccggccagcgtgttgcgggcagagatatcgcgcaataccaggcggtcgttatctgccagccataacggggtgtcgaagaccagttcagcaaggttatcttccagcagactaacgcgtcccgtgacgtggctggcggcgtggtgaatatgcagcggctgccactgggtcagcggtgtatgggtttgaagctcgacaatcacccgtgtgaacggctctggcggcacatcggcaagcagccagtcgccacggttaatctgctctttttccgcatcacccgcgatgttaagcgcgatacgctgcccggcattggcggtttctgttggctggttttgcgcatgcagcgcacgtacacgcatcggtttatttacaccagtcagccagagactatcgcctaccttcacttccccgcttaacgccgtaccggtgacgaccagcccggcaccttttacggtaaatgcgcggtcaatcgcgaggcggaaactatgttggctggcgtgctcgcgttccggcaactgaagcagatgctcgcgcagggcatccattccccgaccttcggttgctgcggtgataaacagttttgcctcagcaaaaccgtattcccgcagaacctcctttacctggcgttcaacctcatcaacacgcgcttcgtccacgcgatcggctttggtcagcgccactgtcagcatcgggttaccggtcagctgcaaaatcgccagatgctcacgggtctgtgccatcacgccgtcatcgcacgccaccaccaacagcgcgtgatcgataccaccaacgcccgccagcatgttggaaagaaacttttcatgaccgggaacgtcgataaaaccaggcacgcgaccatccggctgcggccagtaggcatagccgagatcgatggtcatgccgcgctttttttcttccggcagacggtcagcatttacgccagtaatcgcctgcaataaggttgttttgccgtggtcaacgtgtccggcagtcgcaataatcatttcaacaacatctccaaaaaccgttgctcatcttcaaggcagcgtaaatccagccacaatcgtccgtcataaatacgaccaatcaccggcactggcaattcacgccagcgggcggctaaactctcaaggtggctaccgcgtccatcatggggtgtaaacgttaatgccgcgctcggcaggcgatcaaccggcaggctaccactgccaatctggctaagacatggcataacctgtaccgcaaactccgcgccgtaatgtgcggcaaggggggcctgtaaacgttgtgcctggatttgaatgacctctgcgctgcgggtaagcaggcgcagggtcggtaatttttcactcagagcttcagggtgtaaataaagacgcaacgtggcttccagcgccgcgagggtcattttatccgcgcgtaatgcacgcttcagcgggtggctttgcaggcgggcgatcatctcttttttaccaacaataattcctgcctgcggcccgcctaacaacttgtcgccggagaaactcaccagactgacgcccgccgcaatcaactcctgcggcattggctctttcggcaaaccgtactggctaagatcgaccaggctgccactgcctaaatcagtcactacgggaacatccagctctttgccgagcgccaccagttccgcttcatctatcgctttggtgaacccctgaatgctgtagttactggtatgtactttcatcaacagtgcggtattttcattcaccgcctgacgataatcattcgcgtgcgtgcggttggtggtccctacttcgtgtagggtgcagcctgcctgacgcataacatcgggaatacgaaacgcgccgccaatctccaccagttcgccgcgagataccaccacctcttttccgctggcagtggccgccaacatcaataacaccgccgccgcattgttattgacgatacaggcatcttccgcccccgtaatacggcacagcagctgcgccagcgcccgatcgcgatgtccgcgtccggcgtcgtccagatcatactcgagggtcactgggctacgcatagcctgcgcaacggcttccaccgcggcttccgcctgtaaagctcgcccaaggttggtatgcagcacggttcccgtcaggttgatcaccggacgcagcgcgctctgcgcttctttcgtcaaccgggcatcgacttcttgcgcccagttttcacaccacgcaggcagcgtctggctgccacgaatcacttctcgcgcttcgtcgagcatctgacgcaacaattccaccacgcgggtgtgaccataagtatcacgcaaagaaaggaaggagctatcgcgcaataagcgatcaatagccggaagttgactatagagggaacgcgtttcggttgtcataggaaacctggctgatcaaggccctctcacacggagaagggcgtttaacataaccacggattgtaacgtgagatgggtcaggaggacatatcgcgcatcaagcctttggcggttcggtgcgagcaaaactttcgcggctaaacaggttttcgaccagtttgactaagtgtgggcggtcgacacaccaacctggcgcaacgcggcggaaattgagatatccgacggcacaggcaatggcgatagtcgccagattgaccgtatcggttttgagtgtgccatcgaccagatatccttccagcacatccagactgcggttgattttctcccgctggcgtaacaattcatcttcagactgctgcgccgctggacgcgcctgttcacgcacgcttaccagcccggcatccataatgccatccgccagtgcctcaattttgcgcacccgcaagctctccagcggatcgcgcggcaacatcgccggagcgacattcattaattcaatatattcagcgatgatcgggctatcaaaccagcattcgccctcttcggtcaccagcaccggcacttttcctaacgggttaaattgcgccacgccgttgtccgcgttatagggcagttcattaataaattcgaaagttatgcccttttctaacaacagaatagaaagtttgcgtacaaacgggctggtgtagctaccgacgagtttcatgccgagtcctttgtgcgaggaaaaatatcagtatggctcaatgatccaaataaagataatgcatccagctggtcattcttagcagcactttccgcatcacgctaacatggctgaaatggtcggagtaaaccgccacctgggcgtagatgccgtcgggtaaggcatcgatatcatcgttagggtccagttcaatggttcccagcacaccgtccgtgccgggcacgaccgttaaactttgcaataccccctgcgcctgataagaaccgcctggcacgacaggtaaaatactagtcagtttgccgtgaaacacctgcccaggtagcgcgttaaacaccacttccgcatcatcgccaggtttcagacgtaacaggctgttttgccgaaattgggcgacaatttgccgtttttgctcggggatgaagaccatcaccggacgcagcggcaaggcagctgcgtatgtacctgggcggatcagtacctgagtaacgtagccattgctcggcgcgcgaatgacagtctgctcaaggttatattttgcttcagtaagttgcgctcttaagctcacaatctggctttgctcgccgttaaccatactgtcgagctggctctggatctgcgcctgctccgccacgctgcctttcaccagcgcatcctgcgcgaggaaattttgccgcgcatcgtcgatgtcacgttcgctgaacggattcaccgccgcctggctgcctttcaagtaacgttgataatttttaaacagacggtcgcgctccgcactaacctgggtggtgttggcctgcgcttcagtgagctgcgcacgcagcgtctttatattatgcgtcgccgtcatcaggtcagcctgaagtctgtcaactcgcgcctggtaacgaaccgggtcgagcttaaaaagcacctcgcccttttgaataagctgattattcttgtcagtgacttcagtaacaattcccgtcacctgtggcgtgatagggatcgctatcactgccttttgcgcggtaaaagtgtaagggtggttgtagttcatcaacaaaatcaaaccactcaccagaaacacgcctcccagcgccgccgtcgccagcgtccactgatttaccggaatgcggaagattttaaagaccgcccacgccagcgccacgtaagttaaaacaatcaatagatccataattagatctccgggaacgtggaatagtcagtctttttctcggcggcgagttgatgctccaaccgggaaattcggtcagaaagtgcggcgatttccgggtcagtcgctttctcctggctcgcaacatgactctgcataccccagccacgctccggttgatagagcgtcgcccagatccacagaaacggccagataacatgcagagtaaacaggctcacccagcccgccgtatgaatagcgtcggcatggggatggttgcgctttttggcaatcagataagggatgtcatgtatcgcgatgattccataaaaaatcaccagaaagacgaagatcagcactcccaacgcgaaatagtttagaaacatatctgcctcggattcacgtttatcagtgttgtttttgggctggcagccagaagggagtcaggctgatattttgacaataatccgggttcgcgattctcgccataacaccaaagaataatttttagaggtgatgagttgcttagttacataacgattgtatgacgaaggcataacatgctgtagatcacatcaggtgaacgccgtaagaaaatatcttgtgattcagatcacaaagattcaacaaaccatcaaaacaaaaatgtgacactactcacatttaaatgccatttttagcgaaaatcgccgccttgttgcttttttacacaagcgttttgtgatgaacgtcacgtcaattacctctctaccccctatatttatgtgattgatatcacacaaaaggccgtcgactggacagttaaccgattcagtgccagatttcgcagtatctacaaggtccggctacctctgccgccacattaacaaaaaacctcgggcttccagcctgcgcgacagcaaacataagaaggggtgtttttatgagttccgatattaagatcaaagtgcaaagctttggtcgtttcctcagcaacatggtgatgccaaatatcggcgcgtttatcgcgtggggtatcatcaccgcgttatttattccaacagggtggttaccgaacgagacgctggcgaagctggtcgggccgatgatcacttatctcctgccgctgctgatcggttataccggtggtaagctggtaggcggcgaacgtggcggcgtagtcggtgccatcaccaccatgggcgttatcgtcggcgcagacatgccgatgttcctcggttctatgattgcaggtccgctgggcggctggtgcattaagcacttcgaccgctgggtagacggtaagatcaaatccggttttgagatgctggtgaataacttctccgcaggcatcatcgggatgatcctcgctattctggcattcctcggcattggcccgattgttgaagccctgtccaaaatgctggctgcgggcgttaacttcatggttgtccatgacatgctgccgctggcgtctatctttgttgaaccggcgaaaatcctgttcctcaacaacgccattaaccacggtatcttcagcccgctgggtattcagcagtcccatgaactgggtaaaagtatcttcttcctgattgaagctaacccaggtccaggtatgggcgtgctgctggcgtacatgttctttggtcgtggtagcgctaaacagtctgcgggcggtgcggcaatcatccacttcctggggggtatccacgaaatctacttcccgtatgtgctgatgaatccgcgtctgatcctcgcagtcatcctcggcggtatgactggcgtgttcacgctgactatcctgggcggtggtctggtttctccggcatctccgggttctatccttgctgtactggcgatgacaccaaaaggtgcttacttcgctaacatcgcgggtgtgtgtgcggcgatggctgtctccttcgttgtctctgctattttgctgaaaaccagcaaagtgaaagaagaagatgatattgaagcagcaactcgtcgtatgcaggacatgaaagctgagtctaaaggcgcatctccgctgtctgctggcgatgtgactaacgacctgagccacgtacgtaaaatcatcgttgcctgtgacgccggtatgggttccagtgcgatgggcgcaggcgttctgcgtaagaaaattcaggatgcaggtctgagccagatttctgttactaacagcgcgatcaacaacctgccgccagatgtggacctcgtcatcactcaccgtgacctgaccgaacgcgctatgcgccaggttccgcaggcacagcatattagcctgaccaacttcctcgacagcggcctgtacaccagcctgaccgaacgtctggttgctgcccaacgccacacggcaaacgaagagaaagtaaaagacagcctgaaagacagctttgacgattccagtgctaacctgttcaagctaggcgcggagaacatcttcctcggtcgcaaagcggcaaccaaagaagaagcgattcgttttgctggcgagcagctggtgaaaggcggttacgttgagccggaatacgttcaggcgatgctggatcgtgaaaaactgaccccgacttatctgggtgagtctatcgcggtgccacacggtacggttgaagcgaaagatcgcgtactgaaaacgggcgtcgtgttctgccagtacccggaaggcgtgcgcttcggtgaagaagaagatgacattgcccgtctggtgattggtattgctgcccgtaacaacgagcacattcaggttatcaccagcctgaccaatgcactggatgatgagtccgtcatcgagcgtctggcacacaccaccagcgtggatgaagtgctggaactgctggcaggtcgtaagtaatccaatcccaccctctccacatggagaaggtggggttaattgcctgatgcgctacgcttatcaggcctacaggatgcatcacaatttgttgaatttgcacgttcttgtaggccggataaggcgcttacgccgcatccggcgctgcccctctcctcacggagagggtttgggtgagggaaaagcctcaccccagccctctcgggtaaaaacattgatgaaggttaatactatgaaagcattacattttggcgcaggtaatatcggtcgtggctttatcggtaaactgctggcagacgcgggtatccaactgacgtttgccgatgtcaatcaggtggtacttgatgccctgaatgcccgtcatagctatcaggtacatgtggttggtgaaaccgagcaggtagataccgtttccggcgtcaatgctgtcagcagcattggtgatgatgtcgttgatctgattgctcaggttgatttagtcactaccgccgttggcccggttgtgctggaacgtattgctccggcaatcgccaaagggcaggtgaaacgtaaagaacaaggtaatgaatccccgctgaacatcatcgcctgtgaaaacatggtacgcggtaccacgcagctgaaaggccatgtgatgaacgccctgccggaagacgccaaagcgtgggtagaagaacacgttggctttgtcgattccgccgttgaccgcatcgtaccgcctagcgctagcgcaactaacgatccgctggaagtgacggtagaaaccttcagcgaatggattgtcgataaaacgcagttcaaaggcgcactgccgaacatcccaggcatggagttaaccgacaacctgatggcatttgtcgaacgtaaactcttcaccctgaacacgggtcatgctataaccgcgtacctcggaaaactggccggtcatcagaccattcgtgacgcgattctcgacgagaaaatccgcgcggtggtaaaaggtgcgatggaagaaagtggtgcagtattgatcaagcgctacggctttgacgctgacaagcatgcggcgtacatccagaaaattctcggccgttttgagaacccgtatctgaaagatgatgtagagcgcgtaggccgtcagccactgcgtaaactgagtgctggtgaccgtctgatcaagccactgctcggtacgctggaatatggtctgccacataaaaacctgattgaaggtattgccgctgcaatgcacttccgcagtgaagatgatccgcaggctcaggaactggcagcactgatcgctgacaaaggtccgcaggcggcgctggcacagatttccggtcttgatgccaacagcgaggttgtatccgaggcggtaaccgcttataaagcaatgcaataatggtggaccaggcgcaggacaccctgcgcccgaataacagattgagtgatatgcaggcaacaatggaacaaacccaggcctttgaaaaccgtgtgcttgagcgtctgaatgctggcaaaaccgtgcgaagctttctgatcaccgccgtcgagctcctgaccgaggcggtaaatcttctggtgcttcaggtattccgcaaagacgattacgcggtgaagtatgctgtagaaccgttactcgacggcgatggtccgctgggcgatctttctgtgcgtttaaaactcatttacgggttgggcgtcattaaccgccaggaatacgaagatgcggaactgctgatggcattgcgtgaagagctaaatcacgacggcaacgagtacgcctttaccgacgacgaaatccttggaccctttggtgaactgcactgcgtggcggcgttaccaccgccgccacagtttgaaccagcagactccagtttgtatgcaatgcaaattcagcgctatcaacaggctgtgcgaagtacaatggtccttagtctgactgagctgatttccaaaatcagcttaaaaaaagcctttcaaaagtaagcaacgtctgcttactgcccctctacctgcttcggccgataaagccgacgataatactccagacgttgtagatataacggcacgctttcatcgggtattccggacggaatcgcgttacggggaggaagttttttcagatactcccggaacgcctggctacttgccatgaaatctacggctttatcgataagaagcggaacgttttcacctaatttgcccatgatgatatctccgtattaccccgcgccgggaatgcgcggccgccaattttagtttaggttcccggtaaagatgacattaaggaaaacgtgctgaatcctcaataatcatccgctgctgtttattatcttttttctatagatttcttaattaatcaacgaattgcgcagtttttgagcatgttaatgattacgttacagaactattacaatgtcattagttgtgaacaaagcacctggtcgcgcatactaggggctataaatttatctttatcagaagccatcacatgaaagaagtcgaaaaaaacgaaatcaaacgcctcagcgatcgcctggacgccatccgccaccagcaggccgatcttagcctggttgaagccgcagacaaatatgccgagctggaaaaagagaaagccacgctggaagcagaaattgctcgcctgcgtgaagttcatagccaaaaactgagtaaagaagcacagaagctgatgaagatgccattccagcgcgcaattaccaaaaaagagcaggctgatatgggcaagctgaagaaaagtgttcgcggactggtcgttgtgcacccaatgaccgcactgggccgcgaaatgggcctgcaggagatgactgggtttagtaagaccgcgttttaagaacacagtatctacagggtgattctgcacattcctataggccgagtaaggtgttcacgccgcatccggcaagataaggcgctctggatcaacaacctaagggcaattctctgatgaggattgcccttttctttaccagacatctccccccacaagaattggccctaccaattcttcgcttatctgacctctggttcacaatttcccaattaaaactcacatcaatgttgccaatacataacatttagttaaccattcattgtcattatccctacacaacacaattggcagtgccacttttacacaacgtgtgacaaggagatgagcaacagactcattacacgatgtgcgtggactccaggagacctgcaatgaatctctggcaacaaaactacgatcccgccgggaatatctggctttccagtctgatagcaagccttcccatcctgtttttcttctttgcgctgattaagctcaaactgaaaggatacgtcgccgccagctggacggtggcaatcgcccttgccgtggctttgctgttctataaaatgccggtcgctaacgcgctggccagcgtggtttatggtttcttctacgggttgtggcccatcgcgtggatcattattgcagcggtgttcgtctataagatcagcgtgaaaaccgggcagtttgacatcattcgcagctctattcttagcataacccctgaccagcgtctgcaaatgctgatcgtcggtttctgtttcggcgcgttccttgaaggagccgcaggctttggcgcaccggtagcaattaccgccgcattgctggtcggcctgggttttaaaccgctgtacgccgccgggctgtgcctgattgttaacaccgcgccagtggcatttggtgcgatgggcattccaatcctggttgccggacaggtaacaggtatcgacagctttgagattggtcagatggtggggcggcagctaccgtttatgaccattatcgtgctgttctggatcatggcgattatggacggctggcgcggtatcaaagagacgtggcctgcggtcgtggttgcgggcggcagctttgccatcgctcagtaccttagctctaacttcattgggccggagctgccggacattatctctagcctggtaagtctgctctgcctgacgctgttcctcaaacgctggcagccagtgcgtgtattccgttttggtgatttgggggcgagtcaggttgatatgacgctggcccacaccggttacactgcgggtcaggtgttacgtgcctggacaccgttcctgttcctgacagctaccgtaacactgtggagtatcccgccgtttaaagccctgttcgcaagcggtggcgcgctgtatgagtgggtgatcaatattccggtgccgtacctcgataaactggttgcccgtatgccgccagtggtcagcgaggctacagcctatgccgccgtgtttaagtttgactggttctctgccaccggcaccgccattctgtttgctgcactgctcagcattgtctggctgaagatgaaaccgtctgacgctatcagcaccttcggcagcacgctgaaagaactggctctgcccatctactccatcggtatggtgctggcattcgcctttattagcaactattccggactgagtagtacactggcgctggcactggcgcacaccggtcatgcattcaccttcttcagcccgttcctcggctggctgggggtattcctgaccgggagcgataccagttctaacgccctgttcgccgcgctgcaagccaccgcagcacaacaaattggcgtctctgatctgttgctggttgccgccaataccaccggtggcgtcaccggtaagatgatctccccgcaatctatcgctatcgcctgtgcggcggtaggcctggtgggcaaagagtctgatttgttccgctttactgtcaaacacagcctgatcttcacctgtatagtgggcgtgatcaccacgcttcaggcttatgtcttaacgtggatgattccttaatgattgttttacccagacgcctgagtgacgaggttgccgatcgtgtgcgggcgctgattgatgaaaaaaacctggaagcgggcatgaagttgcccgctgagcgccaactggcgatgcaactcggcgtaagtcgtaatagtctgcgcgaggcgctggcaaaactggtgagtgaaggcgtgctgctcagtcgacgcggcggcgggacgtttattcgctggcgtcatgacacatggagcgagcaaaacatcgtccagccgctaaaaacactgatggccgatgatccggattacagtttcgatattctggaagcccgctacgccattgaagccagcaccgcatggcatgcggcaatgcgcgccacacctggcgacaaagaaaagattcagctttgctttgaagcaacgctaagtgaagacccggatatcgccagtcaagcggacgttcgttttcatctggcgattgccgaagccagtcataacatcgtgctgctgcaaaccatgcgcggtttcttcgatgtcctgcaatccagtgtgaagcatagccgtcagcggatgtatctggtgccaccggtttttagtcaactgaccgaacaacatcaggctgtcattgacgccatttttgccggtgatgctgacggggcgcgtaaagcaatgatggcgcaccttagttttgttcacaccaccatgaaacgattcgatgaagatcaggctcgccacgcacggattacccgcctgcccggtgagcataatgagcatagcagggagaaaaacgcatgattatttccgcagccagcgattatcgcgccgcagcgcaacgcattctgccgccgttcctgttccactatatggatggtggtgcatattctgaatacacgctgcgccgcaacgtggaagatttgagtgaagtggcgctgcgccagcgtattctgaaaaacatgtccgacttaagcctggaaacgacgctgtttaatgagaaattgagcatgccggtggcactggctccggtgggtttgtgtggcatgtatgcgcgtcgtggcgaagttcaggcagccaaagcggcggacgcgcatggtattccgtttactctcagcacggtttccgtttgcccgattgaagaagtcgcgccagccatcaagcgcccaatgtggttccagctttatgtactgcgcgatcgcggctttatgcgtaacgcgctggagcgagcaaaagcagcgggttgtagcacgctggttttcaccgtggatatgccgacaccgggcgcacgctaccgtgatgcgcatagtggtatgagtggcccgaacgcggcaatgcgccgctacttgcaagcggtgacacatccgcaatgggcgtgggatgtgggcctgaacggtcgtccacatgatttaggtaatatcagtgcttatctcggcaaaccgaccggactggaagattacatcggctggctggggaataacttcgatccgtccatcagttggaaagaccttgaatggatccgcgatttctgggatggcccgatggtgatcaaagggatcctcgatccggaagatgcgcgcgatgcagtacgttttggtgctgatggaattgtggtttctaaccacggtggccgccagctggacggtgtactctcttccgcccgtgcactgcctgctattgcagatgcggtgaaaggtgatatagccattctggcggatagcggaattcgtaacgggcttgatgtcgtgcgtatgattgcgctcggtgccgacaccgtactgctgggtcgtgctttcttgtatgcgctggcaacagcgggccaggcgggtgtagctaacctgctaaatctgatcgaaaaagagatgaaagtggcgatgacgctgactggcgcgaaaagcatcagcgaaattacgcaagatagcctggtgcaggggctgggtaaagagttgcctgcggcactggctcccatggcgaaagggaatgcggcataatcgtttgcgccccctcaccctaaccctctccctcagggagaggggaccgttcggcgctgtatgtactccctcactctgaaacgacaccgcactctttttttctccctcgcccctccggggagagggccggggtgaggggaaaaggccgcactgctcaccaattttctgctatcctgcccccgcactaagggggcagtatgctaaacatcgtactttacgaaccagaaattccgccaaatactggcaacatcatccgtctttgcgctaataccggctttcgtctgcatatcatcgaaccgatgggatttgcctgggacgataagcgcctgcgccgcgcggggctggactatcacgagtttaccgccgttacgcgtcatcatgactatcgcgcgttcctcgaagcagaaaatccccagcgcctgttcgccctcaccacgaaaggtacacctgctcacagcgccgtaagctatcaggatggcgattatctgatgttcggcccggaaacacgcggcctgccagcgagcattcttgatgccctgcccgctgaacaaaaaattcgcattccgatggtgccggacagccgcagcatgaatctgtccaatgcggtgagcgtagtggtgtatgaagcctggcggcagttggggtatccgggagcggtattgagagattaattactgtaggccggatagatgattacatcgcatccggcacgatcacaggacattagatcccatccccatactcaaatgtatggttaataccgttgaaatgctggtccatatccatacttggcttatcgctgtctggtttaccgacaatacgagccggaacgccagcggcggtggtatgcggcggcaccggttgcagcaccacggaacctgcgccaatcttcgcgccgcgcccaacttcaatattgccgaggattttcgcgcccgcgccaatcatcacaccttcacgaattttcgggtgacggtcaccaccagatttacccgtaccgccaagcgtcacagattgcagaatgcttacgtcgttttcaatcaccgccgtttcaccaacgacgatgcctgtcgcgtggtcaagcatgataccgcgaccaatttttgctgccgggtgaatatcgacctggaacgtcacagaaacctggttttgcagaaagattgccagtgcgcgacgcccctgattccacaaccagtgaccgatgcgataggcctgcaaggcatgaaaacccttcaggtataacaacggggtactgtatttatcgactgccgggtcgcgggtacgcaccgcctgaatatcacaggccgcagaggcgatcatttccgggtcagcggcgtaggcttcttccaccacttcacggatagcaatagcaggcataattgggctactcagcttgttcgccagcatgtagctcagtgcactgccaaggttttcgtgcttgagtagcgtcgcgtggtaaaaactggccagcattggctcacagtccgccagcgttctggcttcggctttaatattgttccagacaatttccagttcttcacagctcattgcttactccacacgatgagataatgaccggcccgttctgcgcgggccgggtcatagcggtaacaaaggttccctggggttagtggctgctgcgctcgtccttgcgtgcacgacctagtaaagtcaatgctgcctcgcgcgcgttttttccgcaatataatacttgataaatttcctcggttattggcatttcaacgccgaagcgatgcgccagttcgcggacttctttcgtattgcggtagccttccaccacctgaccaatcttctcctgcgcgctttgtacatccatgccctgaccgagcatcatgccaaaacggcggttacggctctggttgtcggtacaggtaagcaccagatcgccaagccccgccatgcccataaaggtggcagggtcggcacccagcgccgcaccaagacggctcatttcagccagcccacgggtgatcagcgccgtacgcgcattcgcaccaaaaccgataccgtcggacatccccgcaccaatggcaataacgtttttcaccgcgccgccaagctgcacgccaatgaaatccggattgctgtaaacgcggaaacttttgccgcagtgcagcagctgctggagatcatcggcaaaggtctgatcggtgctggccaggctaatagctgtcggtaaacctgccgccagttctttcgcaaacgttgggccagagataaccgccagcggaatttgatcgcctaaggcctcacgcgccacgtcctgtaacagacgtccggtttccgcttccagccctttggtcgcccacaccagacgcgcatcaggacgcatcagtggtttaatctggcgcagcacttcaccaaagacatggctgggtacgacgacgagaatattacggctggctgccagcgcagtggcgagatcgctttcaagatggagcgtatcgggaaaaggcacatcggggagaaacgcggcgttacagcggtcgcgttcaagcgttgcgatatgttcagggtcatggccccagaggacaacctcgtggccatttcttgccagggtgatggcaagagcggtgccgtagctgccggcaccgatcacagtcatactagcattacgttggttcatcaggcatcctgatgttcttcagtaccttcgccagcctgctgctgcaaatagttcatgaacagcgcatcgaagttaaccggcgcaaggttcagttgcgggaatgtaccgcgggataccatgctggtgatgcactcacgagcatacgggaacagaatgttcgggcagtatgctcccaggcaatgcgccatctgggtgccttcgatacccgcgatggagaaaataccgccctgctgaacttcacacaggaacgcggtttcttcgcccaaagaggccgttacggtaacacgcagtaccacttcgtatacgtcatctgccagttgggaagatgccgtatccagatcaagtttaacttctggttgccaatctttctggaaaacgtgcggcgcgttcggcgcttcgaaagagatatccttggtataaatacgttggatctggaaagtcatttcagtgttgttttgttcactcatgtgtagaaaacccttaagtgttgtccttaaatactgcgcaatgtaatgccaacgttcacacgttatttcagcaggggatccagtccaccacgtgcatccaatgcatacaagtcatcacagccgccaatgtgctgtgcgtcaataaaaatctggggaaccgtggtgcgaccgctgcgtttgatcatctcttcacgcttggcggcgttgccatcgatcggcagctcctggaaactcacgcccttgctgctcagcagtgcttttgcacgatggcaatacgggcaggtttctttggtatagatttcaacattggccataaattagctcctgtttttttaccctgaaatttcatgttgcagggcggcagcaaaatggagtgtccccagaagcttataacaataagtcgctgggggcctaattgcagctaacggcctgcatcatgaaagacgacaggtaaattatttgccgcgcaccaaaggcaagttttcgccagcccagccagcgacgccttctttcagcacgaatacttgcgcaaaaccagctttcgtcagtgcgtttgcaggctcctggcactgcatgccagaaccgtctaccacgataaccggtttgtctttgtgcttctcaagctcaccaacattgttggctttgatttcgctcggcaacagattaatagaacctgcgatatggcctttacggaagtcatcacgctgacgtaaatccacaaccacagcgtcttctttgttgatcagacgcgtagcttcaccacgagtaatcaccttcactttgctggtcaggctcttaaacgtagtcacaagaaccgccaccagtaacgcgatccaggcgatactcagtatgggatgacggccaacaaattgcataatttcttgcatggggggtaacaactcccgacgtagtgattaaaaaaaccaggaaaggagtatacctgcgcggtgcggcaaatacagccagcgcgttaactggaatgcaattttgcggggcgcgacgaaaaaaaagcgtaaatctggcatcggcttgccgcgagcggtcgtatattttgatcttcagaggctattttatcgattcagctgtagtaaaattacgcaaattttgactcttgagtatgaggttgtcgcaatgttggtttctaaaaaacctatggtactggtgattctggatggctatggctatcgcgaagaacagcaggataacgccatttttagtgctaaaaccccggtaatggatgcactgtgggccaatcgtccgcataccctaatcgacgcttccggtctggaagtcggtctgcctgaccgtcagatgggtaactccgaagtaggccacgttaacctgggtgccggccgcatcgtgtatcaggacctgactcgtctggacgttgaaatcaaagatcgcgctttctttgctaatccggtgctgactggcgcggtagataaagcgaaaaacgcaggcaaagcggtacacattatgggtctgctctccgcaggcggcgtacacagccacgaagatcacatcatggcgatggtagaactggcagctgaacgcggcgcagaaaaaatctacctgcacgcattccttgacggtcgcgacactccgccgcgcagtgctgaatccagcctgaaaaaattcgaagaaaaatttgccgcgctgggcaaaggccgcgtagcgtccatcattggtcgttactacgcgatggaccgcgataaccgttgggatcgcgtagaaaaagcttatgacctgctgactctggcgcagggcgagttccaggccgataccgccgttgctggtttgcaggctgcttatgctcgcgacgaaaatgatgaattcgtgaaagcgaccgttatccgtgctgaaggtcagccagacgcggcaatggaagacggcgatgcactgattttcatgaacttccgtgctgaccgcgcgcgtgaaatcactcgtgctttcgtgaacgctgatttcgatggcttcgcgcgtaagaaagtggttaacgtcgatttcgtgatgctgaccgaatacgccgctgacatcaaaactgcggttgcttacccacccgcttccctggttaacaccttcggcgagtggatggcgaaaaacgacaaaactcagttgcgtatttccgaaaccgaaaaatatgcccacgttactttcttcttcaacggtggcgtagaagagagcttcaaaggcgaagatcgcattctgatcaacagtccgaaagtggctacctacgatctgcaaccggaaatgagctccgcagagctgaccgaaaaactggttgcggccatcaagagcggcaaatacgacaccatcatctgtaactatccgaacggcgacatggtaggtcacaccggggtgatggaagcggcggttaaagcggttgaagcgctggatcactgcgtggaagaagtcgcgaaagcggttgagtccgtgggtggacaactgctgatcaccgctgaccacggtaacgctgagcagatgcgcgatccggcaacgggtcaggcacacacggcacacaccaacctgccagttccgctgatttacgttggtgataagaacgtgaaagcggttgaaggcggcaaactttctgacatcgcgccgaccatgttgagcctgatgggtatggaaatcccgcaagagatgactggtaagccgctgttcatcgtggaataatccctccccatgaggggaaaggcgattaataccatgacacgggccgtgaaaccgcgcaggtttgcaatcaggcccatcatctacgccagcgttcttagcgctggcgtattgttgtgcgccttttccgcccacgcggatgagcgtgaccaactcaaatctattcaggctgacatcgccgcaaaagagcgcgcggtacgccaaaagcaacaacaacgcgcaagcctgctcgcacaattgaaaaagcaggaagaagcgatctctgaagccacccgtaagctgcgcgaaacgcaaaacacgctcaatcaactcaataaacagattgatgagatgaacgcgagcattgccaaactggagcagcaaaaagccgcccaggagcgcagcctcgccgcacaactggatgccgcattccgtcagggcgagcataccggtattcagctgattctcagcggtgaagaaagccagcgtggacagcgtttacaggcttatttcggctatctcaaccaggcgcgacaagaaaccattgcccagttgaagcaaacgcgtgaagaagtcgccatgcagcgtgctgaactggaagagaaacagagcgagcaacaaacgctgttatatgagcagcgcgcccaacaggcgaaactgactcaggcgctgaacgagcgtaaaaagacgctggcagggctggagtcttccatccagcaaggtcagcaacagttgagcgagctgcgcgccaacgaatcccgtctgcgtaacagcattgcccgtgcggaagccgcggcgaaagcgcgtgcagaacgagaagcacgtgaggcccaggcggttcgcgaccgccagaaagaagcgacgcgcaaaggcaccacctacaaaccgaccgaaagcgaaaaaagcctgatgtcccgtaccggtggtctgggcgcgccgcgtggtcaggcattctggccggttcgcgggccgacgctgcatcgctatggcgaacagctacagggtgaattacgctggaaaggtatggttatcggtgcttctgaaggtactgaagttaaagcgattgccgacggtcgggtgattctggctgactggctgcaaggctacggtctggtggtggtggttgagcatggtaaaggcgacatgagtctttacggctataatcagagcgcactggtgagcgttggtagccaggttcgcgcgggccagccgattgcactggtgggcagcagtggcggtcagggtcggcctagtctctatttcgaaattcgccgccagggtcaggcggtcaatccacagccgtggttgggaagataagttttgtttccatttcgtcgtaacgttcttgcatttgccgctctgttggcgctctcctcccccgtacttgctggcaaacttgccatcgtcattgatgattttgggtatcgcccgcacaacgaaaaccaggtgctggcgatgccttccgctatctccgtcgctgtattacccgatagtccgcacgccagagagatggcgaccaaagcgcataacagcgggcacgaagtgttgattcatctcccgatggcaccgttgagtaaacagccgctggagaaaaatacgctacgcccggagatgagcagcgacgaaattgagcgcattattcgtagtgcggtcaataacgtgccctatgccgtggggatcaacaaccacatgggcagcaagatgacctctaacctgtttggtatgcagaaagtgatgcaggcgctggagcgttacaatctttacttcctcgacagcgtaaccatcggtaatacccaggcgatgcgcgccgcgcaaggcactggcgtgaaggtgatcaaacggaaggtattcctcgacgatagccaaaatgaagcggacatccgtgtgcaatttaatcgcgcaattgacctggcgcgtcgcaacggtagcaccattgccattgggcatcctcaccctgcaacggtacgcgtgttgcaacagatggtttataacctgccgccagacattacgctggtgaaagccagcagcttgctgaatgaaccgcaggttgatacttctacaccgccgaaaaacgctgtgcctgatgcaccgcgtaatccgttccgtggcgtgaagctgtgcaaaccgaagaaaccgatagaacctgtttatgctaatcgcttctttgaagtattaagcgaaagcatcagccagagcacgctgatcgtttacttccagcatcagtggcaaggctggggcaaacagcccgaagcggcgaagtttaacgctagcgcaaattaattagcgcaaattaaaggcgctacgcgtaatgcgatggtggctccgcgttttgtcgcgccattgccataagcggaaagaccacagtaacgcctggtaaccgaccttcacgctgcgcacattggtaatcaggcgcttatacataccggaagtaaatatctcggcaatcatccgttggcgggtaagaatatccggctctttgcgcaccgcatggcaaacacgcaatgcctcgtaagttatttgctgatgaaattccggataaatcataattttgtcggcataatttcgatttaatttctccagcaggcgggtaatcttaatatagtgacgttgataattaaggtttttattcccttgtctatgcaaccgactcacactcgtattatgcagataatatttatataaactttgctcggtatatcgcgcacgcagcgcgttaaacatgaattctgttgtccagacaatatcctgatgatgtaatccggcaataaatttaatgttatttttaacaataacatcacggcgataaacccccatccagacaacgtgagtccaacggcggctagaaagccccatccgcagccagtccgggccggttaatacgccggtactgcgaaggcgatcggtggggatggattgccaggtttctcccgtttcacgaaaacaccagtcagcgttgcactgcgccacgtcgaggtcgtcctctaacgccatggtcatcagcgtttcgtacatggtgggacagacttcatcgtcagcatcgacaaaagcgacatatttgcccgttgccacttcaatcccacgattacgcgccacgcttgcgccagcattcgcctgatgcaacaaacgaacgtgcggatagttttctgcgtaatactttgctatttcaacagaattatccgtactaccatcgttaataataatgatttccagagcagtccaggtttgcgtaattaaagattccatacaagtgcggaaatcatcgcccgcattatataacggaataataacactaagtttattggtgctgttcatcataaattaccgacgacctctgaagttatcctgacgttttacaggctttgtattaagaaactattaagcctgtgagatattatttttacaggtgagagagtcacttcagggtagagagataatgagagcagctatataagagatcagcacaattacgaactctttattacactgacaggattttacatatttaacagattatcctcagataaaagggctggaataccagcccttgttcgtgttaatcccagctcagaataactttcccggactggccgctacgcatagcgtcaaagcccttctggaaatcatcgatagagaaacgatgggtaatgatcgggctaagatcgaggccagactgaatcagcgccgccatcttgtaccaggtttcaaacatctcacgaccgtaaatacctttaatgaacaagcctttaaagatcactttggtccagtcgatagacatatcagacggcggaatacccagcatcgcaatacggccgccgtgattcatggtgtcaagcatggtacgaaacgctggcggcgcaccggacatttccagaccgacatcaaaaccttcggtcatgcctaactccgccatcacgtcattgagattttctttggcgacgttaaccgcacgggtgatacccattttacgcgccagctcaaggcggtattcgttaacatcagtgatcaccacattgcgtgcaccaacgtgtttcgccaccgccgctgccataataccaatcgggcctgcaccagaaaccagcacatcttcgcccaccagatcaaagctcagcgcggtatgcacggcgttaccgaagggatcaaaaattgcggctaagtcatcggaaatattgtcggggattttgaaggcgttgaatgccgggatcaccagatattcggcaaagcagcccgggcgattaacaccaacgcctatcgtgttgcggcacaaatgggtacgaccaccacgacagttgcggcaatgaccacaggtgatatggccttcgccagaaacgcgatcgccgatcttgaagcctttcacttcctgaccaatacctaccacttcaccgacatattcatggcccacgaccatcggcaccgggatggttttttggctccactcatcccagttatagatgtgaacgtcagtcccgcagatggctgttttacggattttaatcagcagatcgttatgcccgagttccggtacaggaacgtcggtcatccagatgccctcttccgctttcagtttggataacgctttcatctcacatcctcaggcgataacgcccagttgtttaccaatacgcgtaaatgcttctactgcacgcgtaatttgctcaggggtatgcgccgcagacatctgggtacgaatacgcgcctgacctttcggaacgaccggatagaagaaaccggtaacgtaaatgccctctttttgcagctcacgggcaaatttctgcgccactaccgcatcaccaagcatgaccggaataatggcgtgatcggctcccgccagggtaaagcccgccgcgctcatttgctcacggaactgacgcgcgttcgcccacagacggtcacgcagttcgctgcccgcttcgaccatctccagtactttgatggacgcggcaacaatggccggtgccaggctgttggagaacaggtacggacgagaacgctggcgcagccactcaaccacttctttgcgcgccgcggtataaccaccagaagccccgcccagcgctttaccaagcgtaccggtgataatatcgacccggcccatcacatcgcagtattcatgggaaccacgaccattttcaccgacaaaaccgaccgcgtgggagtcgtctaccatcaccagggcatcatatttatctgccagatcgcaaacgcccttcaggttggcaatcacgccgtccatactgaacacaccatcggtggcgatcagcacatgacgcgcaccggcttcacgcgcttctttcagacgtgcttccagctcctgcatatcgttgttggcatagcgatagcgtttagctttgcacagacgcacaccatcaataatagacgcgtggttcagtgcgtcggagataatggcgtcttccgcacccagaagcgtttcaaacaggccaccgttagcatcaaagcaggaagagtagagaatcgcatcttccatccccaggaaggccgccagtttttgttcaagctctttatggctgtcctgagtgccgcaaataaaacgcacgctagccatgccgaaaccgtgagaatccattcccgcctttgccgccgcaatcagatcaggatgattcgccagcccgagatagttgttggcacaaaagttaatgacgtggcttccatcagccacagtgatatctgcttgctgcgcagacgtaataatgcgctcttctttaaacaacccttccgcccgtgcggtttccagatcgttggttaactgctgataaaattctccacgcattgcgattctccagacagggcaaattccagcacatattacccaaacttataggtcgcgacgagataacgcgttaacacttctgcaaaattcaggataaataacgtgtaacttgatgtctctcaacacctacagatagtagaaaaactgtacagttttggctgggcataatgatgattgattttactgcattgatataaaaagaaaaaatgatgccaaagcatcatttttcctatctcagttggtatcaaaacgctacccactaatggagggaaacttattttctactaaggaaaattctcagcgcctgcatttttgcccctaaagtgttactcctgaagcagcgaaacaaatcgaaccattttcctctccccagatagtttaggttgaagagatcggggcgtttgtaatagcacatgacaaaaatgccctggtcatcgtccacaatgttattatttagtgttattttttgactttccagaactaatttatagaattctttccatttatgctgactaccaacaattgcgcccccaataatatatacatgattgccaatcatgaaatcaaaaacctgttgttgagatgtgacagtaagccctttttttatagtgaaaagatgcatcttactttcatcaaatgggaaatcccaaattttcaatcctcgagttacatttggcttatggcaatagccaaaatctatccacgcaacaagaggcgttttcactaagcccatgttgatagctttatttacaaaataggccttaaggttacataccaaaacatactctggactccagtactctgggttttttaattgtcgaggctcaagtctatttgtaaagctctcatctttttgaattttttcgatacgacttctgatatatctaaatttcttttttatatcgataacgataaccgttgttggttttccgttgcgaatcgcttcaacccttggtttcaaatcgggagaagtgaaaataatcatctcattttcaagtgcggccagacgctcaaagtaactaaaataaacatcaacactacgagctagtttttcacggaaccctttattagcagtccaatcccctctaccaatgtcaaaatatgcagtgataattgtggtggaacttttcattactaataagaccattaatataaaaaaagaattatatcataaatattaatagaatgtatactgtatattatccattcaaatgcttccgttatttatcatacatcggaatattgatactaaagcactattcacatgcaaaaccaacatccgccatgaaggactagctaaaacccaaactagtttgttgcaattagcatccttgcacctctatgtaaagggctgaagggattcggatgtgatggtatgattacagacattcgtgtctgagattgtctctgactccataattcgaaggttacagttatgatcatcgttaccggcggcgcgggctttatcggcagcaacatcgttaaagccctgaatgataaaggcatcaccgatattctggtggtggacaacctgaaagacggcaccaagtttgtgaacctggtggatctgaatatcgcagactatatggataaggaagacttcctgatccagattatggctggcgaagagttcggcgatgtcgaagcgattttccacgaaggcgcgtgctcttccaccaccgagtgggacggcaagtatatgatggataacaactatcaatactccaaggagctgctgcactactgcctggagcgtgaaatcccgttcctgtacgcttcttccgcagccacctacggcggacgcacctccgactttattgaatcccgcgagtacgaaaaaccgttgaacgtctacggttacagtaaattcctgtttgatgaatatgttcgtcaaatcctgcctgaagcgaacagccagattgttggcttccgttatttcaacgtttatggaccgcgtgaaggccataaaggcagcatggcgagcgtcgctttccatctcaacacccagcttaacaacggtgaaagtccgaagctgtttgaaggtagcgagaacttcaaacgcgacttcgtctatgtgggcgacgtggctgatgtgaatctgtggttcctggaaaatggcgtttccggcatcttcaatctcggtactggtcgtgcggaatccttccaggcggtagctgatgctacgctggcttatcacaagaaaggccagatcgaatacattccgttcccggataaactgaaaggccgctatcaggcgttcactcaggcagatctgacaaatctgcgcgcggcgggttacgacaaaccgttcaaaaccgttgctgaaggtgtaacggaatacatggcctggctgaatcgcgacgcataagagctctgcatgaaaatactggtgatcggcccgtcttgggttggcgacatgatgatgagccaaagtctctatcgcacgctccaggcgcgctatccccaggcgataatcgatgtgatggcaccggcatggtgccgtccattattaagccggatgccggaagttaacgaagctattcctatgcctctcggtcacggagcgctggaaatcggcgaacgccgcaaactgggtcatagcctgcgtgaaaagcgctacgaccgcgcctacgtcttacccaactccttcaaatctgcattagtgcctttcttcgcgggtattcctcatcgcaccggctggcgcggcgagatgcgctacggtttactcaacgatgtacgcgtgctcgataaagaagcctggccgctaatggtggaacgctatatagcgctggcctatgacaaaggcattatgcgcacagcacaagatctgccgcagccattgttatggccgcagttgcaggtgagcgaaggtgaaaaaagttatacctgtaatcaatttagccttagtagtgaacgtccgatgattggtttttgcccgggtgcggagtttggtccggcaaaacgctggccacactaccactatgcggagctggcaaagcagctgattgatgaaggttatcaggtggttctgtttggcagcgcgaaagatcatgaagcgggcaatgagattcttgccgctttgaataccgagcagcaggcatggtgtcggaacctggcgggggaaacacagcttgatcaagcggttatcctgattgcagcctgtaaagccattgtcactaacgattctggcctgatgcatgttgcggcggcgctcaatcgtccgctggttgccctgtatggtccgagtagcccggacttcacaccgccgctatcccataaagcgcgcgtgatccgtttgattaccggctatcacaaagtgcgtaaaggtgacgctgcggagggttatcaccagagcttaatcgacattactccccagcgcgtactggaagaactcaacgcgctattgttacaagaggaagcctgacggatgcgggttttgatcgttaaaacaagcagcatgggcgatgttctccatacgttgcccgcactcactgatgcccagcaggcaatcccagggattaagtttgactgggtggtggaagaagggttcgcacagattccttcctggcacgctgccgttgagcgagttattcctgtggcaatacgtcgctggcgtaaagcctggttcagcgcccccataaaagcggaacgcaaagcgtttcgtgaagcgctacaagcagagaactatgacgcagttatcgacgctcaggggctggtaaaaagcgcggcgctggtgacgcgtctggcgcatggcgtaaagcatggcatggactggcaaaccgctcgcgaacctttagccagcctgttttacaatcgtaagcatcatattgcaaaacagcagcacgccgtagaacgcacccgcgaactgtttgccaaaagtttgggctatagcaaaccgcaaacccagggcgattatgctatcgcacagcattttctgacgaacctgcctacagatgctggcgaatatgccgtatttcttcatgcgacgacccgtgatgataaacactggccggaagaacactggcgagaattgattggtttactggctgatagtggaatacggattaaacttccgtggggcgcgccgcatgaggaagaacgggcgaaacgactggcggaaggatttgcttatgttgaagtattgccgaagatgagtctggaaggcgttgcccgcgtgctggccggggctaaatttgtagtgagcgtggatacggggttaagccatttaacggcggcactggatagacccaatatcacggtttatggaccaaccgatccgggattaattggtgggtatgggaagaatcagatggtatgtagggctccaagagaaaatttaattaacctcaacagtcaagcagttttggaaaagttaagtagtttataaaggtaaaacatgctaacatcctttaaacttcatagtttgaaaccttacactctgaaaagtagtatgattttagagataataacttatatattatgtttttttagtatgataattgcattcgtcgataatactttcagcataaaaatatataatatcactgctatagtttgcttattgagtctaattttacgtggcagacaagaaaattataatataaaaaaccttattcttcccctttctatatttttaataggcttgcttgatttaatttggtattctgcgtttaaagtagataatagcccatttcgtgctacttaccatagttatttaaatactgccaaaatatttatatttggttcttttattgttttcttgacactaactagccagctaaaaagtaaaaaagagagtgtattatacactttgtattctctgagttttctaattgctggatatgcaatgtatattaatagcattcatgaaaatgaccgcatttcttttggtgtaggaacggcaacaggagcagcatatagtacaatgctaatagggatagttagtggcgttgcgattctttatactaagaaaaatcatccttttttatttttattaaatagttgcgcggtactttatgttctggcgctaacacaaaccagagcaaccctactcctgttccctataatttgtgttgctgcattaatagcttattataataaaagtcccaagaaattcacttcctctattgttctactaattgctatattagctagcattgttattatatttaataaaccaatacagaatcgctataatgaagcattaaatgacttaaacagttataccaatgctaatagtgttacttccctaggtgcaagactggcaatgtacgaaattggtttaaatatattcataaagagtccttttagttttagaagtgcagagagtcgcgctgaaagtatgaatttgttagttgcagaacacaataggctaagaggggcattggagttttctaacgtacatctacataatgagataattgaagcagggagtctgaaaggtctgatgggaattttttccacacttttcctctattttagtctattttatatagcatataaaaaacgagctttgggtttgttgatattaacgcttggcattgtggggattggactcagtgatgtgatcatatgggcacgcagcattccaattatcattatatccgctatagtcctcttactcgtcattaataatcgtaacaatacaattaattaagaataaacaagtttaagaagtgagttaaaactcacttcttatctatacaacttaatctctttacactattagttaaagtttcagtatcgatatcttttaccgtatatgttggggatactatttgtatagatttatgatgattcggggaccaaattaaatggctgggatattccggagtacgactattagggtaaaatgcaagcgttggtttatgataagccgcagcgatatgaacaagagctgtatcaacagaaatgacaaaatcactatacttggtcaacgcaacggtataaataaactcatcaaatggtagtgtttcgatttcaagtattggtattgtcaataaatcttgcggtaacccggtaaatataatccgataattttcaaagtgtgttttcacttcttgatatataacttttatttgctcaaacgtaagacggcatattttttttgcacctaatggattaataatgactattcttgtatctccaataaattcttttattttatcttcaacatctactggtaaatgcaagtcgtagttggtggaaaatttaccctcaccataaatatgcttcagtatttctattgctcgtgtactcatatgttcttttaaacattcatcgtggggatggtaaaaactatagtaacgcttataccaatgatcaaaacccagaatgtaagaatcttttaaactacttaatattaagctatgcttaaaactgggcatagtttcaaaggggtctaatacaatatcgaactgtaaatcccgcagatgcttacatagagtaagcatttcaagaaaaccggtactttctttaatacagaactcaaatatatttttattattagagagaaattccccaccctttctatttgtgagaagagttattttaacccctttactataaagttcacgataaatgctacttaatacaattagatcaccaagtttattattatcatgaataataaggcaacttttaacttgtgctggatctgtaatttgattatttattttattacgaaataaaaaagaaaggaaattaatcttgattttgtttatataaaatcttttctttttgtgaaaagttcctaagcgcatttttataccatattattttagtttcaggatgattaattagcataagaatcggtactagttctatattgcattttttttcttgtcatatctttactttcttctgcactgatgtcttgaagtttaataaatggaattacatcgtaagaaatagctgtatcatcacttaaattataaatattaatatcttttacattatcatgcataaaacgaaaaaatggcaatattttgaataaatccctacttaattcgctgggcatgggatttttattctcatcatagaaacgagaacagctacccgttaaatcaagaccagaacaaataatccgcgcatacttaagactatatgcgatttgaattgcagcaaaggcaatagtatggcaactgcaataaccaagactaatgtccttgcaaaatccaaccagacgaccttttttagacaacggtacagagatcagcagttctttgtgaatctgtctcaaaatattaaatttaatcttctttataaaaccacctttttcccgacggtaaaaggaccgtaatacgaggcagttctggaggatataaagtttatcttctttggaagcgtgttcataaacgtcaacgtttactatggtataacgacttctctggctaaatttataaaaatcatcacgacgctgatgtaaaaatcggacatctgtaagtacatatataaaaggaacgatattattacttaacagatattgcgcagaaccattgacagcaataatatcctttgttcgtaatacactcaaaggtgttttttggcttgtagggccgctaagaaaaataataacatcatcagatattttattttcaatcaggttttcaacatcttttttgtcaatgtatctaatattcttcatgataaacctgtgaaataaataactccgcttaaaactgtcctggtgaagacatgtaattgtgggattttttttagcgcgctggtttccctttcaaacgccgcataaaattgcgcatttttttacgatatactaaaagataatagcctagatctctaatctcatttttaataccgtaatgacgctctaagtcaatacgatctttcgctttacgctgcgcactagcacgctttccggagagatcgataattcgaacctcaccattttttataatgaagttaccacgatgggggtcgccagaaaccatgccatgttgatgtaaggcattaatactttgctgaattttattttttagcgcatcatcaatatcgggcatatcacacaactctatgccatcaatatactcgatgatcatgatataagtatggacaaaacgtaaggttttccgttcagccaataaataaaagtcattgagtgtatttaacccttcatttcgtactttttgggtttgctcaaaaaggcgttcgtaataatcaccttttaacagagacttaaagaaacgttcgttacgcttaactttcggagaaaaaaccttaagaatcaatttaccgtaatcggtatcaataagcataacttttgtatcatcaatagaacgaaaaaccttgatgatatttatattataagacaagaagtcatttaatacattgaggtacttactattgttttcatcggtaaaaacaaccaagtctttgatcttgctcttctgaatcataataaaccagttaaatgttatttacggtaatattttcggcaaagataacagactcctgctataattcctgagatataatgatgttgcactaaaagatgtttatatcttttttaaattcaataattgatttcgcatctcgtggagagtcatctttccagggggaattttctaaagctattttatagtattttaccgatggataaattgcccatttgtgccacggtttagttgcacctgtataatgaataagaagagtactttctgtaatcagctttttatagttttgatgtgttttgtcttttaattcacttttaattgtataaattgtattgtactcacgaggcaaaaataatgtcatccctttcagtaagacattcataacatcctgatcagggtatttataaacattatctttactcataagaatagacaacgctttttctgttagttttgcgtcagcccattttcttaagtctaaataaacgacaccggaattaaagtactgcccaagtaattcaggatcagacaacctggataccgccttttcttgcattggctcaacatctttaacaacagcagcaaccgctccatttaaacccagatgtaatagttggctaatatcgcctttacaaacaacatctgcatcaagataaagcaaacgatcaagcgttaaacccaataattgaaatgcaaataaacggaagtacattgctcttgaccagacctgtgtacaaggcaagcactggagcttatcagtgttaattctatataacgtgattcttaattggttttgctctgcaagctttgcaattttttgaaaaaaaccatcattataaacatcagcaataatataaaaatcaagattaatatgtcgattatttaggacaattgatgtgatggaaacacctacaccatcaagataattagcatcgacaccataggcaacatttaaacattcagaagtatttatattagctagccgaaaatcccaggctttaactttatctatctctatggcaggaaatgagtccacaatgctacccttatatcattactttatagtttcccagttttaatgctttatcttttcaataaaataaaaaagatagttgctaaatccttttagatatctatgctttttaagcatatgttttgcgctatatcttaattgattgctattgttcggtttcagcaacgccgtattcttccatgggctagcattttttgcctccataaaggcttgacttacaggataatcccaggcccaatcatgccagggcttggttggcccgatataatggataaaaatagtatcgttggttactgggtttataaagctttctttgagttgataatttaagctgaactgggtgttatatttaatatcagcgaaaataagtttatccgccagcaacatatttaacacatcctgatcaggatgtgttatttttttgattatttctggctcatttagcattgcaatagctcgtgcagaaacctgctgagccgcccattgggcagtattaatcaataaaaaaccggagttaaagtaacctttagcaattcccgcaacacctaagctatgggcgcgtttttcccaccagtcagcttgcccttctgtaacaaccattgcgactttatcgtcaggaaaactgaaattaattagtggctcaatagtcccctgacaaatgatatctgcatccagataaaggactttaggcgccttattaataaagtaatctgcaataacaaaacgaaaatatattgcatgagtccaattcttagtgctaggcaaactgcgcagtcgatcaccattaatcagatatattttaattctggttttatactgcaacgccagggcatcaaaatacttacgatcatcatcaccaaaataatcagtaaaaatatggaaacacaatcgacttccttcattatattttaatatactagcaatgctaattccgcaaccaaatagaaagtttttgtcagttccataagcgatgtccagacaaagattttctgtttctactttatgatcataatcaataacactattaagaaactcagtttcctggaaaaacacctgctgcattatttcctccgggaaatagcagaaataattaccttatgtaatctatcgtaatacttgctttggtaaaattcatcgatgctcgcaggaattttttcatgttcgatatgaatttcacctgctatatatttatttagaagagttacaaaaccagcaatatctcccggttgatacagatggccattgacatcaggttgaataatgtcagcaggcccggagacacaatcggcactgatacaaggaatcccccagctcaaggcttcaagtagggtcattgggaaaccttcaaaagaactcgtgagcaataacgcactcactttttcaatatcttgctggaccaattcccagggatattgttgccaaccataccagacaattcgatcatcaatatttaattctctaccataagcctggcatttttcgaaatcggagccatcacccaatacatggagtttccagttacctttcgcttgacttaagccatcaagcaggtctttaactcttttctggccttcaaatttcatacgcccaacataaataaacgttgccgtttcaccttcctcgggcgcgggaatgacactgtctttagtttcgacgggattaaaaataacatttatcgtgctttctgctacacctcgattaatcatttgctgtttaatgccagagctgattgctaaatgatagtcggcacaggtgatatattcagcatgttttttgtgatctaaagaaaaatgtggccaactaaatactggcatatcaattccactttttttacgtgcttttgcggcaaacaggcaggagatcacatcaatacaaataacgatatctggttggtactcctgaagccatttacttagagcatgaatatgtttcgcccgacgcaaaaaacctaaacgaatattggaaaaactacaactgtatttaataccttccagccatcccttatccattttgtcattacgacaaaagaaaaacatttcactttggatatgttgttgcctgaaggtagtaataacatcacggatgacagtttccatgccgccaaatccagaaacagcttcgccgataaacgctattttcatagaaactctcattaattgagtaaaactcactgttttaacggttttatttgtctataaaatcagaaacaatcgtactcatcattttatctggactgaatttatataaactatcataatccattggtttaacagaactgttaataaaatactctaacttatcccaatcatcatgacctattataaaaaagcgagattcactatagatttcactaccaaatacatttatattattagtaattaattttttattgaaaaatagtgcctcaagtatacgaagagtccagccagattggttttctttggttatatcaacaattatattagcatttaatgttcttctaatattctcttcataagatatttgtttttcaatcaaatacttactagtcgtagaacttgtcttatctttgacaacattaaaatctagcttacatcctagtgttgttaatctctcggctaactcattaattatttgaagacgccctttatcacgaccaaggaaaaaacatattggctggctgttatttttgtcagataaactataatttctaatttcatccattcctataggaaaaaattgttctattgccttgatcttttcattccctataaatctatgctcaaaatcatatataatatcgaaataattcgcgttatcaagaataaaatcttcgccaacagtatttcttagaagcaaaactttatgacagttaatattttttaatatttgtttattgatacctttattaacaacactgtcattaatgataattatgtcatcttttttaatatcattgaggtaatgcttgatgaataatcgccccagccatgcattatccatccctattttacttatttttttattaatccagttatatttttttggtgttgttatattttttatcttgtacttttttttcaggtactgaatcatttttaattcataatctgcaacccaatttataaaataaatagtcataataaagttagttccagtacatactaataaatatttttataatcctttgcgttgtgttcgctctttaatacgctcggccttaacgcttgccatgttcaataaattctgttcaagagacaatattttgcgtaaaggcatcccaaaataaaccttcataaatcgccagatatctctttgcgtcaggccaatattcatactactgaaatataaaccaatcaggtctttatcgcgccagcggcgcggtacttttgcacgtatctgtgcccgatgcagatcgataacactaatttttaattcatcttcccggccagtaaatggcaaatgaagcaaaaagtggcaaatgtaacagtcgcggtgatttatccctgcagtatgcattttacgcaccatagttgctacacgtgcgatcagcatacgcttaacacgtatatcaggcgggttgactgcccaatcggcacaataatcttcaaggctaattgtgggagtgagatcttcggtaataataaaacttgcgcgagttaatggatttaaccctttttcgccaaacccaatgcccttcattgtatcaacgccaacatcactcaggcgatgaatagcgtgccactctctgtctgcgcccaaaacgggcatccgcaaactgagtagattttttataatctcttttaatgtcgtccccttgtgccatttaagaaaatagcttttcccggacagttcaaagcgtaatgtacgacgagtctccagttcacgaaagacctcgccgttcagttttttgacctctgcaaaagcatctttaccacgccaaagtgtggcaagcggctcttttaattcaaccatctaaaccacctgtaatgatatccgcggctttttctggcaagctatacaaatcctgagtatcggcataatggcgagcattctccgcccaggccattcgcaatgggctctgagttaacgctttacgtaaaacttcatttaattgttcctgagagaaaggttcagcgatgaccgttccacaattggcatccgcaatataatgcgcgtacccacataccgctgttgttaaaacaggtaacccagcagtgatcgcttctagaagaacgatacccgcggcttcctgataagcgggatgcagtaataaatcagcggctgccattaattcactcacatcattgcgaccgaagaagaaatgcacattgctccgcacgccgagtttttctgccagcgcttcaaattttcgcggcttatcctgaccaacaacaaataaaagcgtattgtgacgtaaactttccggtaagcttgccaaagcttcaatactgcgatctacacctttacggccaaaatcacttccaacctgcagtaataagttttgttgctcttttatgccatttttctggcgataaatttcacggctgtttgggatttgctcactgtattttctgtccggataaataccgggaggaagaatttgaaaacgttcaggttcagtttgataatgcttctggaaatcggcgatttgcttatcggtcagcatcataagtttcgtgcttttaccctgctcgaaagtcgctcgctcaaatgcggcataatggcgatatcgacttgttaaacgatataaaaaacctttttcttgcgcaactttctcggcgtaacaaacatcagcggcaaaataaacatccaggccaggcatcttattaaacccaacaacgcgatctgcgggatgctctttgagatgattttgtacccaggcataatattctgcattgcgtccatggttggtatgggacttaactggcacctgaataagctcaaatgctttcgggcaatcgccttcccagctctgtgtatatacccgaacatggtggccccgtgcggcaactgtacttgcaatgcgcataaagtcacgttgaagcccaccaaatggaaaatatttatataaacaaaacgccacgatcataattgtgcattcctgtcagcactaggggcatcttctggcaacagcttttccgtagcggcgatcacatcctccgctgggataacagaaagatattttttgttgcggtcaagttcatgccgggtcggcattttctgataattccccgcccagaattgaataatattctcggtccagggacgccagaatacgtgatccgttgcaccaaatagactaatgactggcgttttcactgccgctgcaatatgtcccggcgcagaatccacaccaataaaaagcactgcatgatcaattaatgcacccagttcaggaaaacgtgttttacctgcaaggccagtaatgggttttgtttcgcaacctcgtgcaatctcatctacacaagcgagatcatctgcgctgggcccacaggttagcacaacctgatagcctcgctgttgcagcgcatcgataaccttagaaaatttatcgttatcccaacacttaaatatctgacgcgctgtcggttggatgacaacataatgatcttttacgcccagggcatctaattcccggcgcatcttcttccagcaatcttcggcgtaactcattgttgtgtcggtgtagaaatcggtaatacctaatggctcaaggacgcttaaattacgctcaacaatatgtgtaccgtgtattggcgctaagtgtgtgaagctttttttccaaataccatgctgccgatgaccataaagttggcttattttcatccgtgcaggtaaacaacgtaccagcagcgccaccatccactgatccgtaagattaatgaccaggtcataattattcgcacgcagagtttttatcaagctaagcacatttttaattttatcgaaagttcccgcacctttattgcttatcccatagagcgcattaatttccgggttttcagacaaaatagggatggtgtcctgataaagcagcatatcgatttttgcatcaggataattctgcttgagcgtactgatgacaggagtagttaataacatatccccatgatatcgcatctttatgaccaggatttttcgaaatggcttttccactagcgactcttttgtgtgattgtctggttaagttaagcagaaaaaagcacgctaccgccccaggctcaacagctacctgaatactgataacgcacttactttgacgtgctagtgtatcatttctttcgcagcaatccgacccgaatgatttttatacacaaaatatactttaatcataaaaatcaaatagataaaaaatagcatttcgataatgtcagtacggcctatgtagatttgaaaatggggccgagtttcaatgaatcgcataaaaatacaaaaaaaatgaagatgtagcggcagatcagaccaaactgaagctatttaagtcaaaaacgggaaaagtaatggtaaagccacagctaaatacatagaatccccagcacatccataagtcagctatttactatgctcgaattgctttacaccgcccttctctaccttattcagccgctgatctggatacggctctgggtgcgcggacgtaaggctccggcctatcgaaaacgctggggtgaacgttacggtttttaccgccatccgctaaaaccaggcggcattatgctgcactccgtctccgtcggtgaaactctggcggcaatcccgttggtgcgcgcgctgcgtcatcgttatcctgatttaccgattaccgtaacaaccatgacgccaaccggtagcgagcgcgtacaaagcgctttcgggaaggatgttcagcacgtttatctgccgtatgatctgcccgatgcactcaaccgtttcctgaataaagtcgaccctaaactggtgttgattatggaaaccgaactatggcctaacctgattgcggcgctacataaacgtaaaattccgctggtgatcgctaacgcgcgactctctgcccgcagcgccgcaggttatgccaaactgggtaaattcgtccgtcgcttgctgcgtcgtattacgctgattgctgcgcaaaatgaagaagatggtgcacgttttgtggcgctgggcgcaaaaaataatcaggtgaccgttaccggtagcctgaaattcgatatttctgtaacgccgcagttggctgctaaagccgtgacgctgcgccgccagtgggcaccacaccgcccggtatggattgccaccagcactcacgaaggcgaagagagtgtggtgatcgccgcacatcaggcattgttacagcaattcccgaatttattgctcatcctggtaccccgtcatccggaacgcttcccggatgcgattaaccttgtccgccaggctggactaagctatatcacacgctctagtggggaagtcccctccaccagcacgcaggttgtggttggcgatacgatgggcgagttgatgttactgtatggcattgccgatctcgcctttgttggcggtagtctggttgaacgtggtgggcataatccgctggaagctgccgcacacgctattccggtattgatggggccgcatacttttaactttaaagacatttgcgcgcggctggagcaggcaagcgggctgattaccgttaccgatgccactacgcttgcaaaagaggtttcctctttactcaccgacgccgattaccgtagtttctatggccgtcatgccgttgaagtactgtatcaaaaccagggcgcgctacagcgtctgcttcaactgctggaaccttacctgccaccgaaaacgcattgaggttgttatgcaaaaacgggcgatttatccgggtactttcgatcccattaccaatggtcatatcgatatcgtgacgcgcgccacgcagatgttcgatcacgttattctggcgattgccgccagccccagtaaaaaaccgatgtttaccctggaagagcgtgtggcactggcacagcaggcaaccgcgcatctggggaacgtggaagtggtcgggtttagtgatttaatggcgaacttcgcccgtaatcaacacgctacggtgctgattcgtggcctgcgtgcggtggcagattttgaatatgaaatgcagctggcgcatatgaatcgccacttaatgccggaactggaaagtgtgtttctgatgccgagcaaagagtggagctttatctctagtagcttggtgaaagaggtggcgcgccatcagggcgatgtcacccatttcctgccggagaatgtccatcaggcgctgatggcgaagttagcgtaacgtttatgccggatggtatgccatccggcgcgcatgaattacttctggcactgccgacaataaaacgttgcccgctgcgcatgtttagtcgccacaatcggcgtaccgcacacccgacacggctcaccttttcgcccgtaaacctgcaattcctgagcgaaatagcccggtttaccatcactttgcagaaaatctttcagcgttgtaccaccctgctcaatgctacgcagcaacaccgctttaatcacccgagctaacaattcacactctgccaggctcagactactcgccagccgatccggatggatccccgccgcaaacagactttcgctggcatagatattccctacccctaccaccagcttgttatccatcagccacggtttaatcgccgtttttttcttcgcgcacttctgatgcagatactcaccattgaaatcgtcgctaagcggctccggtccaagatgggtcagcacattatgcccttccagctctttggtccacagccaggcaccaaagcggcgcggatcggtgtagcgcagcactttgccgttgctcatcaccaaatccacatggtcatgcttttcagggggaagttcttctggaaggatgcgcaggctgccagacatccctaaatgaatgataatccagccctcaggcagctccagcagcagatatttagcccgccgctgcacgctaagcactggttggtcgcttaaacggtagatctcttcactaaccggccagcgcaagcgtccgttgcgcaccactgcatgaagaatggttgcaccaacgagatgcggttctatgccgcggcggctggtttcaacttcgggtaattcaggcatagcatctccaggaatgaacagatgcagtcaatatgggggcaagcagataacaaaaaaccccgccggagcgaggttttttgttacatcaaagcgagaattatttgattttcgcttctttgtagatcacgtgctggcgaacaactggatcgaattttttcagttccagtttttccggcttagtacgtttgttcttcgtagtggtatagaagtgaccagtaccagcagaagaaaccagcttgattttctcacgaatacctttagccatgatttatttcctctaagtacttagtacttttcgccacgggcacgcagttcagccagaactgtatcgatgccttttttatcgattacacgcatacctttagcagatacgcgcagggtgacaaaacgcttctcgctctcaacccagaaacggtgagagtgcaggttcggcaggaaacggcgtttagtcgcgttcagtgcgtgggaacggttgttaccggtcaccggacgcttgccagtaacttggcagactcgggacatgtctattctccaaaaatcaaattagctcgagcttcgtatggggtattggcgcctcgtcaggctttacagcccggtcatcgcagttctatgtgaactctcgattgccaggcccaaatgccaaacccgagattctcaaaggtggcgtagtatacgctgactcagcgatgtgctcaagtcccgaacagacaaagatcccgaaggatcgcgcatagcgggttaaatccagccgcgttcggcaaaagaaacatactctccacgcccaatcacgatatggtcgagcacgcgtaaatccatgaactgacaactctttattatccgttcagtaatgagtttatccgctttactgggttcagcacaaccgctagggtgattatgtgcaaggatcagcgcgctggcgtttatttttatcgcttcgcggataatttcccgaggatggacttcaacatggtttagcgtgccggaaaaaagacgcctatgcgttataacccggtgttgggagtcgagaaagatcaccataaagatctcccgctcctcacccgtgagctggctttgtaaaaattccctcgtcatctccgggctgagtaaagggctttcttcacgcatccgcacgttgtagtaacgccgcgccagttcagcaatcccctttaactgggcaaatttcgccacgccaattccatgaacgccactaaattgttcatattcagaggttaacaagccataaagagagccgaaattctccagcatctcttttgccagggttaatacatctttaccgcgcgttccggtacgcagaaatagcgccagcagctcgacatccgttaaggcgctaataccaaacttcagcattttttcgcgcggcatcaacagctgactattgtttttcaccttcacctcctttgtggtgctcgcatcctgtcatagccgtttcgttaaatcgacggccagttttcaatcctggaaagcgcctcgcaaagtgaatctcaggtgaaggcacgacaacaaaagtattgtgataaaatcgccaacttctggtgtcaccctacaggaaaaatcatcatgagcctggccggtaaaaaaatcgttctcggcgttagcggcggtattgctgcctataaaacccctgaactggtgcgtcgtttgcgcgatcgcggggccgacgtccgcgtagccatgaccgaagcggcaaaagcctttatcaccccacttagcttgcaggcggtttctggttatcccgtttccgacagtctgctggacccggcagccgaagccgctatgggccatattgagctgggtaaatgggctgatttagtgattctcgcccctgccacggcagatttgattgcccgtgttgctgccggaatggcgaatgacctggtaagcacgatttgtctggctacacctgcgcctgtagccgtgctccccgccatgaaccagcagatgtaccgtgccgctgccacgcagcataatttagaggtgcttgcttcccgtggtttgctcatctgggggccagacagtggcagtcaggcttgtggtgatatcggtcctgggcgaatgctcgatccgttaaccattgtggatatggcggtagcgcattttagccccgtcaacgacctgaaacatctgaacattatgattaccgccggcccgacgcgtgaaccgctcgatccggtgcgttatatctctaatcacagctccggcaagatgggttttgctatcgccgccgccgctgcccgtcgtggcgcgaacgtcacgctggtaagtggtccggttagtctaccgacgccaccgtttgttaaacgtgttgatgtgatgaccgcgctggaaatggaagccgccgtgaatgcttctgtacagcagcaaaatatttttatcggctgcgccgccgtggcggattatcgcgcagctaccgtggccccagagaaaatcaaaaagcaggccacgcagggtgatgaattaacaataaaaatggttaaaaaccccgatatcgtcgcaggcgttgccgcactaaaagaccatcgaccctacgtcgttggatttgccgccgaaacaaataatgtggaagaatacgcccggcaaaaacgtatccgtaaaaaccttgatctgatctgcgcgaacgatgtttcccagccaactcaaggatttaacagcgacaacaacgcattacaccttttctggcaggacggagataaagtcttaccgcttgagcgcaaagagctccttggccaattattactcgacgagatcgtgacccgttatgatgaaaaaaatcgacgttaagattctggacccgcgcgttgggaaggaatttccgctcccgacttatgccacctctggctctgccggacttgacctgcgtgcctgtctcaacgacgccgtagaactggctccgggtgacactacgctggttccgaccgggctggcgattcatattgccgatcctagtctggcggcaatgatgctgccgcgctccggattgggacataagcacggtatcgtgcttggtaacctggtaggattgatcgattctgactatcagggccagttgatgatttccgtgtggaaccgtggtcaggacagcttcaccattcaacctggcgaacgcatcgcccagatgatttttgttccggtagtacaggctgaatttaatctggtggaagatttcgacgccaccgaccgcggtgaaggcggctttggtcactctggtcgtcagtaacacatacgcatccgaataacgtcataacatagccgcaaacatttcgtttgcggtcatagcgtgggtgccgcctggcaagtgcttattttcaggggtattttgtaacatggcagaaaaacaaactgcgaaaaggaaccgtcgcgaggaaatacttcagtctctggcgctgatgctggaatccagcgatggaagccaacgtatcacgacggcaaaactggccgcctctgtcggcgtttccgaagcggcactgtatcgccacttccccagtaagacccgcatgttcgatagcctgattgagtttatcgaagatagcctgattactcgcatcaacctgattctgaaagatgagaaagacaccacagcgcgcctgcgtctgattgtgttgctgcttctcggttttggtgagcgtaatcctggcctgacccgcatcctcactggtcatgcgctaatgtttgaacaggatcgcctgcaagggcgcatcaaccagctgttcgagcgtattgaagcgcagctgcgccaggtattgcgtgaaaagagaatgcgtgagggtgaaggttacaccaccgatgaaaccctgctggcaagccagatcctggccttctgtgaaggtatgctgagtcgttttgtccgcagcgaatttaaataccgcccgacggatgattttgacgcccgctggccgctaattgcggcacagttgcagtaatatgacgccggatgacttttcatccggcgagtttctttaaacgccaaactcttcgcgataggccttaaccgccgccagatgttccgccatttccggcttctcttccaggtaagcaatcaggtctttcagggtgatgatagagatcactttgcagttgtaatcacgctcaacttcctgaatcgcgctaatctcgccgcgcccgcgttcctgacgatcgaggctaatcaacacgccagcaagcgtcgcgccattggcctgaataatctccatgctctcgcgaatcgccgttccggcggtgatcacatcatctaccagcattacgcgtccttgtaacgcgctaccaaccagattgccgccttcaccgtggtcttttgcttctttgcggttaaagcagtacggcaggtccaggtcgtgatgctccgccagtgccacagcggttgtggtggcaatcgggatccctttgtaagcagggccaaacagcagatcgaactcaatgccggaatccaccaacgcttcagcgtaaaaacggcctaacagtgccagatcgcgcccggtattaaacagcccggcgttgaagaaataggggcttttgcgcccggatttcagcgtaaactcgccaaactttaacacctgcttgctaagcgcaaattcaataaactggcgctgatatggtttcatgccttcgctcctcatcttacttttctacagacaaaaaaaaggcgactcatcagtcgccttaaaaatcagtttgccagcgccgccttctgcgtcgttacaatggattgctttcccctcgggccagagccaacaagatgagtagctcttcatgggtgaacggctcgccttctgccgtcccctgcacttcaatgatgcgcccgtcttcggtcatcactacgttcatgtcggtctctgcggcagagtcttcaacgtattccagatcgcaaaccgcttcgccgttcacaattccgacagaaactgcggctaccatccctttcatcggattggttttcagcttgccgttttccaccagcttctgtagcgcatctaccagcgccacgcaggcacccgtaatgctcgcggtacgcgtgccaccatcagcctgaagcacgtcgcagtccagcgtaatggtgaactcacccagcgctttcaaatctactgccgcgcgaagagcacgggcgatcagacgctggatttccattgtgcgtccaccctgcttacctttcgccgcttcacgagcgttacgggtgtgggtagaacgtggcagcatgccgtactctgcggtgatccagccctggccctgacctttcaggaagcgcggcacgccttcttcaatagaggcggtacacaacactttggtatcgccaaattcgaccagcacgctgccttctgcatgttttgtatagttacgagtcagggtaacgggacgcacctgattattgctacggcctgctggacgcatattgaaatctccggcttgaaacaaatgtggctgcgcattatacggacttccggcggttattcctatcctgacaaggcatcgatggctataatccttccacctctccttttataaacaggaacgtctatgatccgcagtatgaccgcctacgcccggcgtgaaatcaagggtgaatgggggagcgcaacctgggaaatgcgcagcgtaaaccagcgttatctggaaacttactttcgtctgccggagcagttccgtagccttgaacctgtcgttcgcgagcgtattcgttctcgcctgacgcgcggtaaagtggaatgtaccctgcgctatgagccagatgttagcgcgcaaggtgagctgatcctcaacgaaaaactggctaaacagctggtaactgccgcgaactgggtaaaaatgcagagtgacgaaggggaaatcaacccggttgatattctacgctggccgggcgtgatggcagcccaggagcaggatcttgacgccattgccgctgaaattctcgcggcgctggatggtacgctggacgactttattgtcgcgcgcgaaaccgaaggtcaggcactgaaagcattgatcgagcagcgtctggaaggcgtcaccgccgaagtggtcaaagtccgctcccatatgccggaaatcctgcaatggcagcgtgagcgtctggtcgcgaagctggaagatgctcaggtgcaactggaaaacaaccgtctggagcaggaactggttctgctggcacaacgaattgacgttgccgaagaactggatcgcctcgaagcgcatgtcaaagagacctacaacattctgaagaaaaaagaagcggttggtcgtcgtctggattttatgatgcaggagttcaaccgcgagagcaacactcttgcgagcaagtctatcaatgccgaagtgacaaactccgccatcgagctgaaagtgttgattgagcagatgcgcgagcagattcagaacatcgaataactcgtaacgccaattcttacttttccgccttcacaaatgccgccactcaaacagagcggcatttttcttccccgcaacattcaattctgttttgcgtgcctgctccagattttgcgatgtttttttgcccagcacactgagaacgcgagatactcacaactgtatataaatacagttacagatttactttctttgcaattgatatcacatggagtgggcaatgaacgaacatcatcaaccttttgaagagataaaactgattaatgcaaacggagcagaacaatggagtgcaagacaacttgggaaactactgggttatagtgagtatcgtcactttatacctgtattaacgcgcgccaaagaagcctgtgagaacagtggtcacacaattgatgaccatttcgaggagatcctcgatatggtcaaaattggcagtaatgccaaaagagcattaaaagacatcgtactctcccgctatgcctgttacctggtagtacaaaacggcgaccctgcgaaaccggtcattgcggcagggcagacttattttgctatccagacccgacggcaggagcttgctgacgatgaagcatttaagcaacttcgtgaagacgaaaagcgtctgtttctgagaaatgagttgaaagaacataacaaacaattggttgaggcagcacagcaagctggggtagcgacagctactgatttcgccatatttcagaatcatggttaccaggggctgtatggtggattagatcagaaagctattcatcagcggaaggggctgaaaaagaatcagaagatcctggatcatatgggtagtacagaactggcggctaatctctttcgagctacccaaacagaagaaaaactcaagcgggatggcgtgaatagtaaacagcaagcaaacaccacacactttgacgtgggtcgcaaggtgaggcaaaccattcaggaacttggcggaaccatgcctgaggagttgccgaccccgcaggtcagcatcaagcagttggaaaacagtgtaaaaattacagagaagaaataacagaaactaaaaactctttttgttgattgagacacccgatgcgtaagccaaggtccaggtgcagtgaacacaatggctaaatattgcacctttcttttccccctcagttttaacctattttttcttatgcattttctcagacaagaagtcagaagaatgcatctctgctacagaaaatagcgatttcacataactacaagttatcaatttcccctccccttaaaaaatctcaatcgtgacaatgcgcacaaatcgctaccctgccagacagatttttagggagagaaccatgctgttatacattttgtatttggttggcattactgccgaagccatgacgggggcgctggcggccggacgacggcgcatggatacatttggcgtaattattattgcgaccgccaccgcaattggcggagggagtgtgcgcgatattctgctgggccactatccgctcggctgggtcaaacacccggaatatgtgattatcgtcgctaccgccgcagtactcaccactatcgttgctcctgtaatgccttacctgcgcaaagtgtttctggtgctcgatgcgctcggactggtggtcttttctatcatcggggcacaggttgcactggatatggggcacggcccaattattgccgttgtcgcggcggtaaccaccggcgtgtttggcggcgttttgcgcgatatgttctgtaaacgtatcccactggtattccagaaagagttgtatgccggtgtcagttttgcctccgccgtgctgtacatcgcgctgcaacactatgtttctaaccatgatgtggtaattatctccaccctggtattcggcttttttgcccgcttactggcgctacgccttaagctgggattaccggtcttttactacagccacgaaggacattaaggttcaaaacctgtgatctgctgggcagccagccaactgcccagcttcttgatttgcgcattttccttccattcaataacctgtctggcgcgtccgcttccagtccccggcagctgctgccagaactgctccgtgctaaataaaagttggctccaggaccgttcatcactggcattaagcgccgcccgggttagcggtattcccattgccatcacccagcgagtaaaaggctgcttacgagccagattaaactgatgccatagctgcgcacttttacttttcgcgatccccggcgtgttctgtaattgctctggcgttaataaaagccaggaaaagatatgttcaaagcgatgagtctgatgcagcgcgcgccaaccggcctcaccaatgccatccagcccaagaacctgttttgcccccagccagactaagcgactaatgaactgttcctgacaaacatcagaagcaaagtagcaggtcaagctgttaaagcggttttctggcggtgtcggttttgtacgttctgcaccgcgccacaccacatcatcaatgcgaggaataccctgaccggcaaggctgacgagaatctgatcaccaggcgcaatatcccactcctgccagcgcctgacggaaccaatattcacccgctggacttttttatcatccagcatgacaggtgcgagactcgcaaccacgcttattttaccgctcttacccaccgcaaactgaattgccttcacttcggcaacctgagctacaggttgatatttccaggccaccagccactctgcctggcccggtagccaatggcgggattctggctctttcgccgctcgtacaactacgccatcggtgacgaagggtaattccgctttccaccactcattgcgtacgcgcgcaacttcatcagcatttttcaccgcacgggtatacgtctgcgttagagtaaaacctgcggtagccagctcttttaaacgatcagacattaactgcggtccatccggccatgcccagacaaaaacgcccagagaattcagcgtgtcgctatcgtcctggcgcatcatcaagccagcaacttttgcgcgggcatttattccccccatttgttgttggatatgcccctcgcgctggagaaatatttccccctgaagcgtactgttggctaaaggcccgctaacggtttgcggcacagcggaaattaagctaactttctgcgtccagtcctcgcctttcaggccattaccgcgactgattgctttgttcagtttcccgtcccgataaaccagggttaccgcaacgccatcaacttttggctgcacccaaagatcgctacgttctcgcatccacagacttaatgcgtttttatccaccattttgcgtacacccgtatgggcaaccggatgcataaccgcaccatttaaaggcggcatcatcacgtcgcggggctcgctcccaaagcagcgttgccactgcgtaagacgggcgcttaactgatcgtaaacaccgtcttccacctcactttttccttccttccagtagtcatcgtcccactgttttatttgctgttgcaggcgggaaatttcttcctgtgctctggctgggctccaggccggacagaccgcccacacagaactttgccagcacaagatacctattaatatcgccatccatactttcatcatcacctccgctgtagatagtcaggcagatatacaacgtgatgaaagcaaagccgagtggcaaaaacggagtctgcgaggacgcttcctgaaaatcgtctttattgcagtgaatgacaggcaaatgcggaagcagctacgcaaaacgcaacaactttgcgcaaaaagtgtgagcaagggctacgtcacatggccgcgccgtgtataataagctcgtatgtaggctttatttcgctaatcacatacgaaagatactcatggctcaaggcacgctttatattgtttccgcccccagtggcgcgggtaaatccagcctgattcaggctttattaaaaacccaaccgttgtgtgacacccaggtttctgttagtcacaccacacgccaaccgcgtcctggtgaagtccacggtgaacattatttctttgttaatcatgatgaatttaaagaaatgattagcagagatgcgttcctcgaacacgcagaagtttttggtaattactatggcactagccgtgaggccattgagcaagtactggcgaccggtgtcgatgtttttctcgatatcgactggcagggcgcgcagcaaattcgccagaagatgccgcacgcgcggagtatctttattttaccgccgtccaaaattgaactggaccgccgtctacgcggtcgcggtcaggacagcgaagaggtcattgcaaagcgtatggcgcaagctgttgcagaaatgagccattacgccgaatatgattatctgattgtgaatgatgacttcgataccgcgttgaccgatttgaagaccattattcgcgccgaacgtctgcgcatgagccgccaaaagcagcgtcatgacgctttaatcagcaaattgttggcagactgaacctgatttcagtatcatgcccagtcatttcttcacctgtggagctttttaagtatggcacgcgtaactgttcaggacgctgtagagaaaattggtaaccgttttgacctggtactggtcgccgcgcgtcgcgctcgtcagatgcaggtaggcggaaaggatccgctggtaccggaagaaaacgataaaaccactgtaatcgcgctgcgcgaaatcgaagaaggtctgatcaacaaccagatcctcgacgttcgcgaacgccaggaacagcaagagcaggaagccgctgaattacaagccgttaccgctattgctgaaggtcgtcgttaatcacaaagcgggtcgcccttgtatctgtttgaaagcctgaatcaactgattcaaacctacctgccggaagaccaaatcaagcgtctgcggcaggcgtatctcgttgcacgtgatgctcacgaggggcaaacacgtagtagcggtgaaccctatatcacgcacccggtagcggttgcctgcattctggccgagatgaaactcgactatgaaacgctgatggcggcgctgctgcatgacgtgattgaagatactcccgccacctaccaggatatggaacagctttttggtaaaagcgtcgccgagctggtagagggggtgagcaaacttgataaactcaagttccgcgataagaaagaggcgcaggccgaaaactttcgcaagatgattatggcgatggtgcaggatatccgcgtcatcctcatcaaacttgccgaccgtacccacaacatgcgcacgctgggcagtcttcgcccggacaaacgtcgccgcatcgcccgtgaaactctcgaaatttatagcccgctggcgcaccgtttaggtatccaccacattaaaaccgaactcgaagagctgggttttgaggcgctgtatcccaaccgttatcgcgtaatcaaagaagtggtgaaagccgcgcgcggcaaccgtaaagagatgatccagaagattctttctgaaatcgaagggcgtttgcaggaagcgggaataccgtgccgcgtcagtggtcgcgagaagcatctttatagcatttactgcaaaatggtgctcaaagagcagcgttttcacagcatcatggacatctacgctttccgcgtgatcgtcaatgattctgacacctgttatcgcgtgctgggccagatgcacagcctgtacaagccgcgtccgggccgcgtgaaagactatatcgccattccaaaagcgaacggctatcagtctttgcacaccagcatgatcggcccgcacggtgtgccggttgaggtccagatccgtaccgaagatatggaccagatggcggagatgggtgttgccgcgcactgggcttataaagagcacggcgaaaccagtactaccgcacaaatccgcgcccagcgctggatgcaaagcctgctggagctgcaacagagcgccggtagtagctttgaatttatcgagagcgttaaatccgatctcttcccggatgagatttacgttttcacaccggaagggcgcattgtcgagctgcctgccggtgcaacgcccgtcgacttcgcttatgcagtgcataccgatatcggtcatgcctgcgtgggcgcacgcgttgaccgccagccttacccgctgagccagccgcttaccagcggtcaaaccgttgaaatcattaccgctccgggcgctcgcccgaatgccgcttggctgaactttgtcgttagcagcaaagcgcgcgccaaaattcgtcagttgctgaaaaacctcaagcgtgatgattctgtaagcctgggccgtcgtctgctcaaccatgctttgggtggtagccgtaagctgaatgaaatcccgcaggaaaatattcagcgcgagctggatcgcatgaagctggcaacgcttgacgatctgctggcagaaatcggacttggtaacgcaatgagcgtggtggtcgcgaaaaatctgcaacatggggacgcctccattccaccggcaacccaaagccacggacatctgcccattaaaggtgccgatggcgtgctgatcacctttgcgaaatgctgccgccctattcctggcgacccgattatcgcccacgtcagccccggtaaaggtctggtgatccaccatgaatcctgccgtaatatccgtggctaccagaaagagccagagaagtttatggctgtggaatgggataaagagacggcgcaggagttcatcaccgaaatcaaggtggagatgttcaatcatcagggtgcgctggcaaacctgacggcggcaattaacaccacgactagcaatattcaaagtttgaatacggaagagaaagatggtcgcgtctacagcgcctttattcgtctgaccgctcgtgaccgtgtgcatctggcgaatatcatgcgcaaaatccgcgtgatgccagacgtgattaaagtcacccgaaaccgaaattaatgttttatgaacccaacacgttatgcacgcatctgcgaaatgctcgccaggcggcagcctgatctgaccgtctgcatggagcaggtccacaaacctcataacgtttctgcgattattcgtaccgcagatgccgttggcgtacatgaagttcacgccgtctggcctggtagccgcatgcgcaccatggctagcgcagcggcgggtagtaacagctgggtacaggtgaaaacacaccgcaccattggcgatgccgtcgctcatctcaaaggccagggcatgcagattctggcaacccatctttctgataacgctgtcgatttccgcgaaattgattacactcgcccgacctgcattttgatgggacaggagaaaacgggcatcacgcaggaagcattggccctggcggatcaggacatcatcattccgatgatcggcatggtgcagagcctgaatgtttccgttgccagtgccctcattctttacgaagcccagcgtcagcggcaaaatgcaggcatgtacctgcgtgaaaacagcatgttgccggaagcagagcaacaacgcctgttgtttgaaggcggctatccggtgctggcgaaagtcgcaaaacgcaaaggcctgccttatccccacgtcaatcagcaaggcgagatcgaagctgatgccgactggtgggctactatgcaggctgcagggtaagtgccatgaaaggtcgcctgttagatgctgtcccactcagttccctaacgggcgttggcgcagcacttagtaacaaactggcgaaaatcaacctgcataccgtgcaggatctactcttacaccttcccctgcgctacgaagatcgcacccatctctaccccatcggagaactactgccgggcgtttatgccacggtggaaggcgaagtgctgaactgcaatatctccttcggcggtcggcggatgatgacctgccagatcagcgacggttccggcatcctcaccatgcgctttttcaatttcagcgcggcaatgaaaaatagcctggcggcgggccgccgtgtactggcttatggcgaagcaaagcgcggtaaatatggtgcggagatgatccacccggaataccgcgtgcagggcgatctcagcacgccagaattacaggaaacgctcacgccggtttatccaacaacggaaggcgtaaagcaggccacgctgcgtaaattaaccgaccaggcgctggatctgctcgacacctgcgccattgaagaactcctgccgccggaactgagtcaaggaatgatgacgctaccggaagcgttgcgcactttgcaccgcccgccaccgacgctacagcttagcgatctggaaaccgggcagcatccggcgcaacgtcgtctgattctggaagaactgctggcgcacaacctcagcatgttagccttacgtgccggagcacagcgttttcatgcccagccgctgagcgccaatgacacgctgaaaaataaactcctcgccgccttaccgttcaagccaacgggcgcacaggcacgcgtagtggcggagatcgagcgcgatatggcgctggatgtgccgatgatgcgtctggtgcagggcgatgtaggttccggtaaaacgctggtcgccgccctcgccgcgttgcgtgcgattgcccacggcaaacaggtagcattgatggcaccaaccgaattactcgccgagcagcacgccaataacttccgcaactggtttgcaccgctcggtatcgaagtgggctggctcgccggtaagcagaaaggtaaagcacggctggcacagcaggaagccatcgccagcggtcaggtgcagatgattgtcggtacacacgccatcttccaggaacaggtgcagtttaacggcctggcgctggtgattatcgacgaacagcatcgttttggcgtgcatcagcgtctggcattgtgggagaaaggccagcagcagggcttccatccgcatcagttgatcatgaccgccacgccgatcccccgcacgctggcaatgactgcgtatgccgatctcgataccagcgtgatagatgagctgccgccaggccgcacgccagtgactacggtcgctattcctgatacccgccgtaccgacatcattgaccgcgtgcaccacgcctgcataactgaaggtcgtcaggcatactgggtttgtacgttgattgaagagagcgaattgctggaagcgcaggcggcggaagctacctgggaagagttgaaactggcgctaccagagttgaacgttggcctggtacacgggcggatgaaacctgccgagaaacaggcggtgatggcgagctttaaacaaggtgagctacacctgctggttgccacaaccgttattgaagtcggcgttgatgtgcctaacgccagtctgatgattatcgaaaacccggagcgtctgggtctggcgcagttacaccagctgcgcgggcgcgtaggtcgtggcgcggtggcttctcactgcgtgctgctctacaaaacgccgctttctaaaacggcgcaaattcgcctgcaagtgctgcgcgacagtaacgacggttttgtgattgcgcaaaaagatctggagattcgcggccctggcgaattgttaggcacgcgtcagacgggtaatgctgaatttaaagtggcggatttactgcgcgatcaggcgatgatcccggaagttcagcgcctggcacgccatattcacgaacgttacccacaacaggcaaaagccctgatagaacgctggatgccggagacggaacgttacagcaatgcgtaaaaggcggcagtgagaagaccgccatttcaggttaccctaccttcctgccggatgcgattcatcaccctacaaattcaataaattatgaatcaatacgcaggcttgataagcgaagcgtatcaggcatttgtctttgttgcggcggcacttctaccgccgcttcatcggttaaccggcaaaaatcggcaacatcaaatacaacttaattaccagcgcattgacgatatcgataaagaacgcaccgaccatcggcaccaccaaaaacgccatgtggcccgggccaaagcgttcagtgatcgcctgcatgttggcgattgccgttggcgttgcaccgaggccaaaaccacagtgacccgcagccagcactgccgcatcgtagtttttgcccatcatgcgccaggtaacgaagatggcatacaacgccatgaagatggtctgtaccaccagaatcgccagcatcggcagcgccaggctagccagctcccacagtttcagccccatcaacgccatcgccaggaacaagctcaagcttacgttacccagcacggataccgcacgctcaaagacgcggtaaaagcccattatactcagaccgttgctcagaatcacgccaacaaacagtacacagacgaaggtcggcagttcaaaagcagtgccagccaaaagttgcgcaacaattttccccaccgtcaggcagatagcaatcagcgcgatagtttcaatcagcaccaagctggtgatcatgcgtcccacatccggcttttcaaacgccgtcgggacttcctggtcatccggaataccgttcggcgtggtggagtgtttcaccagatagcgcgccaccggaccgccaatcaagccgcccagcaccagaccgaacgttgcacaggccatcgccacttccgtcgcattggtgaagccataacgttcaatgaacaatttactccacgcagcgcccgtaccgtgaccgccggaaagagtaatagaaccggccaacagccccatcagcggatcaagccctaacaagctagccataccaatgccaatggcattttgcatcaccaacagaccaacaaccacaatcaagaagatgccaaccacacgcccaccggcacgcaaactggcaatgttggcgttcaggccaatggtggcgaagaaagccagcattaacggatcgcgcagggacatatcaaagttgacttcccagcccatgctttttttcagtactagtagcgccagcgccaccaacaaaccacccgcaacaggttccggtatggtgtatttcttcaaaaaggagacggaatggaccaacttacgcccgagcagcaacgtcagcgttgcggcaacaagcgttgctaaagtatcgagatgaaacatagttactcctttgtatccgcatcactctttcatactcgtcatacttcatcgcgcagtggcaacttcatgaactatgacgggtatcgagttatgctttcctgggtcaaattctcagctgttaatgaacaaatggcatggattttaagcagaaaaataccaaaagttatataaaaaagtgcatttatctcatttaaatatttagatgaggatgtggcaaacgtttgcttttctctttcggtcagctaaaatgcccgctttgctaccacgggattgttttcgatgtctgtttccaccctcgagagtgaaaatgcgcaaccggttgcgcagactcaaaacagcgaactgatttaccgtcttgaagatcgtccgccgcttcctcaaaccctgtttgccgcctgtcagcatctgctggcgatgttcgttgcggtgatcacgccagcgctattaatctgccaggcgctgggtttaccggcacaagacacgcaacacattattagtatgagcctgtttgcctccggtgtggcaagcattattcaaattaaggcctggggtccggttggctccgggctgttgtctattcagggcaccagcttcaactttgttgccccgctgattatgggcggtaccgcgctgaaaaccggtggtgctgatgttcctaccatgatggcggctttgttcggcacgttgatgctggcaagttgcaccgagatggtgatctcccgcgttctgcatctggcgcgccgcattattacgccgctggtttctggcgttgtggtgatgattatcggcctgagcctaattcaggttgggttaacgtccattggcggcggttacgcagccatgagcgataacaccttcggcgcaccgaaaaatctgctgctggcaggcgtggtcttagccttaattatcctgcttaaccgtcaacgtaacccttacttacgcgtggccagtctggtaattgcgatggcggccggatatgcgctggcgtggtttatgggcatgttgccagaaagcaacgaacctatgacgcaagaactgattatggtgccaacgccgctctattacggtcttggcattgaatggagtctgctgctgccgctgatgctggtctttatgatcactagcctggaaaccattggcgatatcacggcgacctctgacgtttccgaacagccagtgtccggtccgctgtacatgaaacgcctgaaaggcggcgtgctggcaaacggcctgaacagctttgttagcgcggtgtttaacaccttcccgaactcctgcttcgggcaaaacaacggagtgatccagttgactggtgttgccagccgctatgtcggttttgtcgtcgcgctgatgttgatcgtgctgggtctgttcccggcagtgagcggttttgtacaacacattccagaaccggttctgggcggcgcaacgcttgtaatgtttggcaccatcgccgcctccggtgtgcgtatcgtttctcgtgagccgctgaaccgtcgggcgattctgattatcgcgctgagcctggcggttggtctgggcgtgtctcagcagccgctgattttgcagtttgcccctgaatggctgaaaaacctgctctcctccgggatcgccgcgggcggtattactgccatcgtgctgaatctgattttcccaccagaaaaacagtaattcactggcggcggtaagataattaccgccgcagtctcacctctttaaccattcccgccttgaggattgcgcgtaaatcgtgcataactcccttatgtgcatttcacgggatggaagaccatgaaatttattgggaagctgcttctctacattctcatcgctctgttagtggcgatcgctggcctctattttcttctgcaaacccgctggggagcagaacatatcagcgcatgggtttccgagaatagcgactatcatctggccttcggggcgatggatcaccgtttttccgcgccatctcatatcgtgctggagaacgtcacgtttggtcgtgatggccagcccgcgaccctggtggccaaaagtgtcgacattgcgctaagcagtcggcaactgaccgaaccacgccatgtcgataccatcctgctggaaaacgggacgctgaatctcaccgaccagaccgcgccgctaccgttcaaagccgatcgtctgcaactgcgtgatatggcgtttaatagcccgaatagcgaatggaaactgagcgcgcagcgggtaaatggcggcgtagttccgtggagtccaaaagccggtaaagtgctgggtacgaaggcgcagattcagtttagtgccggaagccttagcctcaatgatgttcctgccaccaatgtactgattgaaggcagtattgataacgatcgcgttacgctgactaacctgggtgccgacatcgcccgcgggacattaaccggaaacgcgcagcgtaacgccgacggcagctggcaagtggaaaacctgcgcatggcggatatacgtctacaaagcgaaaaaagcctaaccgacttctttgcgccattacgctctgtcccgagcttgcagattggtcgcctggaagtgatcgatgctcgtttgcaaggtccggactgggcggtgaccgacctcgatctcagcttgcgcaacatgaccttcagtaaagatgactggcagacacaggaaggcaaactgagcatgaacgctagcgagttcatttatggtagcctgcatttatttgacccgattataaacacggaattttccccgcagggcgtagcgctgcgccagttcaccagccgctgggaagggggtatggtcagaacgagtgggaactggctgcgtgacgggaaaacgttgatccttgatgatgcggcaattgccgggctggaatataccttgccgaaaaactggcaacagttgtggatggaaacgacacccggttggttaaacagcctgcaactgaagagatttagcgccagccgcaatctgatcattgatatcgaccctgacttcccgtggcagctcaccgcgctcgatggttacggtgccaacctgacgctggttaccgatcataaatggggcgtctggagtggcagcgcgaatctgaatgccgccgccgcgacattcaatcgtgttgatgttcgtcgcccgagcctggcgctgaccgccaacagcagcacggtgaatatcagcgaactgagtgcatttactgaaaaaggcattctggaagccaccgccagtgttagtcaaacgccacaacgtcagacacatatcagcctgaatggacgcggtgtgccggtgaatattttgcaacagtggggatggcctgaattaccgttgactggcgacggcaatattcagcttaccgccagtggcgatattcaggccaatgtcccgttgaaacctacggttagcgggcaattgcatgccgtgaacgccgcaaagcagcaagtgactcaaaccatgaatgctggcatcgtttccagcggtgaagttacaagcacggagccggtgcggtaaacatcaatctcgccgggtacgactcagacgtacccggcattccatcaatagattacaacgtaattgtcagcgcattcccttgaggcttcaccaccagcccctgctcactttcagcctggctaccgtcttgcagaccatttactttcacaacattgcgcaggcacagtgtccagttcttcgcctcgcccgcaccagtcacagtaatcgtgttgccagtacgtgctgcttttaaagtaaagatcacgcttccgtcagcagcgggcacttcacagacggcttcatgcccgtcttgcagattgaagaggtggaatgccgtgccttcgtgccacacgtaatcgggacgttgatcgttgttgcccagcgccagtagagtgttatcacgcacataaacgggcagactcaggaagccgtgctgctgtttatgccagcgactaccgtcgagttcatcgttgtgccacaggtgtgtccagcgaccttccggcaggtagaactgcacatcgcccgcttcagtgaacaccggcgcaaccatcacgttgtcgcctaacatgtattgacggtcaaggtaatcacaagccggatcgtccgggaactccatcatcatggcccgcatcatcggcgtaccccgcgcgttcgcacgcgcagcttcacgatacagatacggcatcatgcggcatttcagttgcgtgaagaagcgcaccacatcacaggactcatcatcgtaggcccacggcacacgataagatttgctaccgtgtaaacggctatggctggagagcaaaccaaacgcgcaccagcgtttgtaaacgtgcgccggagcggtattttcaaagccgccgatatcgtggctccagaagccaaaaccactaaggccaatagacaaaccaccgcgcaggctttccgccatactttcgtagttagcgtaacaatcgccaccccagtgtaccgggaatttctgcgcaccgacggaggcgctgcgggcaaacaagacagcttcttcctcaccaacggtgtccttgagcacgttccacaccagttcgttgtagatgtacgcataatggttatgcattttctgcggatcggaaccgtcaaaccactgaacatcagttgggatacgttcgccaaagtcggtcttaaagcaatcaacgcccatcgcgaccagacctttcagtttgtcggcgtaccatttgcaggcatccggattggtaaagtcataaatcgccagacctggctgccatttatcccactgccataggctaccgtccgggcgtttgagtaaatagcctttctcttgtaactctttaaagacgggggatttttgaccgatataggggttaatccagacgcagattttcagtcctttcgctttcaggcggcggatcatcccttccgggtcagggaaagtcagcgggtcccactcaaaatcgcaccactggaaggctttcatccagaaacagtcaaagtggaaaacatgcagcggcagattgcgttccgccataccatcgataaagctgtttaccgtcgcttcgtcgtagttggtggtaaaactagtggttagccacaggccgaaggaccacgcgggcggcagcgccggacgaccagtaaagcgggtataacgatcaagtaccgctttcggcgtcgggccgtcgataacaaagtattcgagatattcactctcaacgctgaactgcactttggagactttctcgcttcccacttcaaaagagacacactggggatgattgaccagtaccccataaccacggttagtcatgtagaacgggatatttttatacgcctgttcagtacttgtgccgccgtcccggttccaggtctctaccgtctggccattgcgcaccagggcagtaaagcgctctcccagaccgtaaactgtttcgccaacgccaagatcaagccgctcaaacatataattgcgttgattattcgtgtcctgcacgtagccattatttttcacctgactaccggtaatacgttcgccgttgcgcagaaaatccagactccagaactcacctttgctgacacgcgcgcttaagttgccacttttaaactcagcataacgttctgtgttttcgattgtgaccttcacgtcctgcaaaatattgagcggataatgaggaccgttattcagcgccccctgaaaatgctcaatccgcacaccgacaataccttcctgtggggagaaaaagcgcaacgtaaataaaggcgtatcaagctgccaggtacgttcacgcacatcacggggggcagcatagaccaccatttcattatcctgctgttcaacctcgaacacctgaagcgggtgaatcaaattgaggccaggttgaatcaaccagtttccatcgctaattttcattgccgttccttagttctgcacttcttgagaggtgaattgttgctggcaacggcgtttaccctgagccagctgttccataacggttttcagattgtgcgtcgtgagactgtagtagcgtttagcgataatcgcgctcagcaaataacagatcgccggaacaatcgtgaatagcgcaataatgatgctaatcgtggcgctgttctgcgctttttctgccgcatcatatccgccataagccagcatccagccgataagagcgccgccgaaggccaaccccagtttgagcacaaacagcgtgccagcaaaactgatcccggtcaggcgtttaccattgcaccactcgccgtagtcgacggtatcggacatcattacccactggataggtgtcaccagttgatgcaacacaccaatcacgaagatgaagacaaacatagtgatgctggcctgcatgggaacaaagaacatcgcgaggctaatcactgccagcagggcgttcgtccaccagaagatagtgactttacatttccagtcggtcagaggttttgccagtgcggaaccaatcaggttacccacgcaataagtggtgagaaaagcgacaaacacttccggcgtgcccaaaatccatgtgacgtaatacatcatcgccccaccgcgtacgcacaccgccaggatattgaaaatggttagtaaaccgacaatccgccactggtcgttttgccagatatcacgtaaatcttcccgcatagacgttgttgtaggtggtgcttcaacgcgttctttagtggtgaagaaacaaaatgccagcatcatgaatgccaccacggaaaggaccgcgataccgccctggaaaccgagtggtttattatcaccgccaattaaattaaccagtggcatcatcagaacagtagaaagcatgcctcccgcggtcgccagcacaaaacgccaggattgcaggctgatacgctgagtcgggtcattggtgattacaccacccaatgcgcagtaagggatattgacgacggtataaagtaaggtaagtagggtgtaagtaattgctgcatagatcattttgccgttcatactgagatctggcgtgctataggccagtacacagacgatcccgaatggcagtgcgccaaacagtacccacggacgaaatttaccccagcgagagcgcgttcgatcggccaacaaccccatgcaaggatcggaaatcgcatccagtgcacgagcgaccaaaaacatggttccgacaaaaccggcaggaatgccaaaaatatcggtataaaagaacatcatatataacattacgttatcgaaaataatgtggctggcggcgtctcccatgccataaccaattttctctttaacggacaacacttcactcttcatctgcttttccttgatgctataggggtgctgagaccgataacgcattttgtaaaccatccctgtgagagcgaatattccgatatctggttattaatttatgattcttgttttatgtgatcgtggtagcgttaattccgctcatatatcattgtaaaatatgggttttatatgaactataatgctttcgtgataatacgctgcgtgtattaggcggaaaaaactgatctgggggatgtagaaactcaaggaagtagctataatgcgccccgcctccatgtagcaatcgaggcgcggaagatcgtcgtctccggtgaggcggctggacttcaaatccagttggggccgccagcggtcccgggcaggttcgactcctgtgatcttccgccaaaatgcctctcctgacgttctccaaccccttgtaatactgtcaatccagatattttctactgctcaatattcaatcggcttcaggaatacctggtctaaggttttgtgatggacgatgagcggctgaagaatccgcctgtcggttcttctgtcctcgaacgcatccgcgatattcacgccagtatgcgccgtgtttatttgcaggtgatttgcccccctgctgactctcagccaactgtatcgccattaaggtgaagatgttgttttactcgccccagaacacccttttttatacgactattctatttctttaaccgctggcgaaaaaaactgactataaacttcaccaataatcagactgccatcaagattaatttgttcatttaatatatcaaatcaacttgttttatttttactatcaaaaatagctcattgccttactataattaatatataaattcggtaattaattcttaacatgcttttactaataatctcaattgctggccctataatattgcgctagcattgctttctggttgtatcagcgatactcaaaaattcttaatacaatactcattcgactggtacttatttgtaactcagttatattttttcgcccggtgattcagaagaatgcaaaaaacggctaccactccaagtaaaatacttgatctcactgccgcggcatttttacttgtcgcctttctgacgggtattgcgggcgctcttcagactcctaccctaagtatattcctcgcagatgaactgaaagcccgtcctataatggtaggttttttcttcaccggtagcgctattatgggaattctggtcagtcaatttctggcaaggcactccgataaacaaggcgaccgtaaattactgattctgctatgttgcttatttggagtgctggcctgcacgctttttgcgtggaatcgcaactacttcattctcctcagtacgggcgtacttctgagtagttttgcttccaccgcaaacccgcaaatgttcgccctcgcccgtgaacacgccgacagaacaggccgtgagacggtcatgttcagtacatttttacgtgctcagatcagccttgcctgggttatcgggccaccgctcgcttatgaactggcaatgggatttagttttaaagtgatgtatctcaccgctgccatcgcatttgttgtttgcggactgatagtctggttgtttttgccaagtatacaaagaaatattcctgtcgttacccaacccgtagaaattttaccctccacccacaggaagcgggatacgcggctactttttgtggtctgtagtatgatgtgggcggcgaataatctctacatgataaatatgccgctatttattattgatgaactgcatctaaccgataaactgactggagaaatgattggtatcgctgccggtctggaaattccgatgatgttaatcgcaggctattacatgaaacgtattggcaagcgactattaatgctcattgctatcgtgagtggaatgtgtttttacgccagcgtactcatggcgacgactccggcggttgagctggaattgcaaattcttaatgccatcttccttggtattctctgtggtatcggcatgctttattttcaggacttgatgcctgaaaaaataggctctgcgacaacgttatatgcaaatactagtcgcgtcggctggattatcgccggctctgttgacggaattatggttgaaatctggagctaccatgcgttgttctggctggcgatagggatgttgggtattgcgatgatttgcctgctgtttattaaagatatttaactcaccagtctgggctaagaaaaatcggcgtggcgcaaacagagccatcctcgccatttttgctatcatgcctgcatacataaacgacaaaacagtatgcagagggaaaaatgggttccaccagaaaggggatgctgaacgttctgattgccgccgtgttgtggggaagtagtggggtctgcgcgcaatacatcatggagcaaagccagatgagcagccagtttttgactatgacgcgtttgatattcgccggtttgattctactgacgctgagttttgttcatggcgataaaatcttttctattattaacaatcataaagatgccattagcctgctgattttttccgtggttggcgcgctaactgtacagctcacttttttgctaaccatcgaaaaaagcaacgcagccacggcaacggtgctgcaattcctcagtccgacgattatcgtcgcctggttcagtctggtgcgtaaaagccgcccgggcattctggttttctgcgctattttgacaagcctggtcgggacttttttattggtgacacacggtaatccgacgagtttaagcatctctcctgccgcgttgttctggggcattgccagcgcatttgctgctgcattctataccacctatcccagtacgctaattgcccgctatggcacgttaccagtcgtcggctggagtatgctgattggcggtctgattctgttgcctttttatgccagacaaggaacaaactttgtcgttaacggcagtttgattctggcgtttttttatttggtggtcattggtacgtccctgacatttagtctgtacctgaaaggagcacaattaattggcggtccaaaagccagcattttgagctgtgcagaaccattaagtagcgcgctactctctttgctgttgctggggatcacgttcacattaccggactggctgggaacgctgctgattctgagtagcgtgattttgattagtatggattcccgtcgccgcgccagaaaaataaatcgtccggcgcggcataagtgagaattaccagccaggcaccgcgccaccgttaaaaatggtttctgccgctttagcgacttcgggactttgataagattgcagaaattccttcacgttttctgcattcttattatcttcccgtgccaccaaaatattcacatacgggctattcttatcttcaataaatacgctgtcgtgcaccggagaaagcccggtctgctgaatgtaagtggtgctgataatcgctacatcaactttgggatcatccagtacgcgcgggagctgcgccccctcgagttccataatctgcaaatgacgaggattatcggttatatccagcgcggtaggtaataacccttttccctctttcagagtaattagcttctctttttgcaacagtaaaagtgcgcgaccaaggttggtcgggtcgttggggatcgccactgtcgcgccttcttttatttgcgccacggttttgatttttttggaataacccgccatagggaagacaaacgtatttcccaccgctaccagtttataaccatgcgcctgattatcttgttcaagaaagggtcgatgctggaagacattcgcatcaagttcgccatgatttgtcgcatcgttcggtagcaagctaccgctaaatcctaccagttcaacatcgaggccatatttctcttttgccacctttttagcgacttccgcgacatcttgttctgcgccatttataacgccaactttaatgtgttttgcatcgctgctactctggtcgcaacctgccagcagaattccggccagcaataatgcggcccctgtccgtagatgatgtgttgtcagtttcatttttttatccttttattaatgattacctgactatagcggtaaggtcgctgcggtttaaaaaacgaaacgctatcgataagaataaaaaggaataaaagtggaatataaagtctggcacttcttactgaccacgcaagcgcgtttcgtacagcatgatgagagcgatgaaagcaaactacacttatgcttcattcgatacacatttgtaaaaggttgaatccatgaaaccaacgacactactgcttattttcacttttttcgctatgccaggcatcgtatacgccgagagcccttttagcagtctgcagtccgcaaaagagaaaaccacggtattacaagatttacgtaaaatttgcacgccacaggcgagtttaagtgatgaagcgtgggaaaagttaatgttgagtgatgaaaacaataaacaacatatacgcgaggccatcgtggcgatggaacgtaataatcagagcaattattgggaagcgttgggtaaggtagaatgcccggatatgtaagaacagcaacaactactgaccaacgcttctttacctgatatcaggatttcttcattttcacctttgcagtaaccaacaatgcagtcagcaacatcaatgtgccggacaacatcaacgggctagtcagaccaatattatccagcgcataaccgccgattgccgcgccacaggtattagcaagctgaataaccgccacctgaatagacccggctttttctgcctgatcggccaggctgcgggtgatccacgtactccagccgacgggaaccaatgcaaaagttagcccccagataatcgccacgccggtagcaacgattttatcgcttccccacaacgtcagtaccaacgcactcacagccagtattaacggcgcgcctgctaaggccagttttacgctacgtttaagaatgaagctgctaaggctcgtaccaataaagctggcgataccaaaactcaacagcaccagcgttaagccatccacgccgaatcccgccaggttcatatacaccgggcgaatatacgtgaagaaagcaaactgcccggcgaaagacatgaagatggcgatcatccctgccatcacacccggacgttgtaataagcggaaagtattttgtttctgatggctgggttcgcctggcagactaggcaaacttttgataatccagaaaatacacagcacgcccatcaccgccgccgcattaaagacattgcgccaaccgataagctcgcctaaaaaactgcccaacggcgcggcaatcaccagcgcaatagaaaccgcgccgaagatcacgctcagcgccttcggcaccgtacgcggcggcaccagacgcatggtcaggctcgcgctcatcgcccagaacccgcccagcgccagccccagacaggcacgaccgattaaaagcaaactgaaactgttagcaaaggaaaccagcaagcaggagagcgtcagcaaaacggcaaacaaaataacaacgtagcggcggtcagtagcctgaattgtctgggtaataaacaaactggcaaacattgccacaaaggcggtcacggtcacgctttgcccggcaaccccttcgctaatgcctaaatcctgggccattggcgtcaacaaactgacgggcaaaaactcaacgataatcagacaggcgacacaaaacgccacgctgaaaacggcactccagttcggtcgggtgatggcatccgcgccgcggttttcggcaataaattcactcatggtgttacccgtggcatgtttcaggggaaaagcgctccactttaacatactaatgtgactcgcatttaacgtttttgcaacttttacggtgttgctactgctggagttaagatcgaaacggaacagggcaaagattaccggatgcggcgtgaacgtcttatccacccgacaggtcaggcgcggtctgtaggctgataagacgaaacggtttcaatgcaaccagtgaacgccctcggcaggctgaaagaacgcgttatagcgcatctgaaaagcattaatatcctgcatttcaggttcggtttcgcgcagaaaacctagcgccagcctgacctgagcgtcggtaatcggcgcggcgaggcgagctttttgtaaaatccgatgccattgcagcaggttctgttcgctaccatcgacaatgacaatttgccagatgagcaacacctgcgcggcgttttgcaggtggctctcatccggacgatgcaaataacgtaaaaattcgtcaccagcactctttcccatttgatcgaccatgctctccacgggtacgacatcgatgttcagccgatcgctgagacggcgaatcgcttttctggccccggatgtcagcacccgaaaaccaaccacaaacactaccgccagcgtggcgagcattatccagatcatgagttctcctgcgtaatcagaactcatgatatctggaaaccctcgccagttattaatccaccagaataatcttcagtgcaaacagagctgcgaccaccaccacacacaggttcagatcgcgccagcgcccggtgcatactttcatgatgcagtagctcataaagccgagtgcaatcccttcggtgatgctgaaagtaaagggcatcatcaccgtggtaataaacgcaggcacgctttcggtaaaatcatcccagttaacgcgcgccaggctgctagtcatcagcacgccaacaaagattaacgctccggcggttgcgtaaggaggaactatcgccaccagcggactgaagaacataaccaacaggaacataacgccaaccacaaccgcagtcagccccgtgcggccaccgactgccacaccagaagtactttcaatataggcagtaacagagctggtgccgataaacgcacccgccacgctactgacgctatcaacatacagcgccttattcatattggggaatttaccgttaccatctattaagcccgctttatcagttacaccaattaatgttccactactatcaaataggttgatcagcataaaggagaaaatgataccggcgagttcaagtgttaacgcgccgctcaaatctacttcaccaatgacgccgctaatatcaggcggaatggaatagacgccgctaaaatgaacatcaccgaaaaataatccacagcaagacgtcaccacaatagaaaccagcaccgcggcatgaaaatgacgactactcaacacggttataataaaaaaccctaaaatacctaacaacacgccgtgagaacttaaatcgccaatcatcaccagcgtgtctttattggcgacaataacgccagtattttttaatcccattaaggcgataaataatccaattccgctggtgataccaatacgtaaacttaagggaatgttggagatcatccagtaccggatacgaaacagcgtgagcaaaaatagtccaactgcgccccagaatattgcgcccatcccggtctgccaggagatgcccatcgcccccacgaccacgaaggcaaagaaggcgttcagccccattgccggagccagcgccacgggtaagttagcaaatatccccatcgcaatactgccgataccggcaatcaaacaggtggtaacaaacaccactttcgggtccatttgtgccgcgccgaggatttgcgggttcacaaaaacgatgtacaccatggttaaaaaagtggtcatccccgcaatcaattctgtgcggacggtggtcccatgctgaggtagtttaaataatcggctaagcgtcccactttcattactcacgtaatcggtattgtcattattcatttttttgtccattggaggagatttaatcccttgcttttgtaaaacaaatgacaacaacggttcagtgataattatcacatttcaattgcacattaatggatattctttaataatctcgcgacgtttctttatgataaataataatcaaattgataaaatcaaaatgagaaaaatatgaataattctattaaccataaatttcatcacattagccgggctgaataccaggaattgttagccgtttcccgtggcgacgctgttgccgattatattattgataatgtctctattctcgacctgatcaatggcggagaaatttccggcccaattgtgattaaaggacgttacattgccggtgttggcgcagaatacactgatgctccggctttgcagcggattgatgctcgcggcgcaacggcggtgccagggtttattgatgctcacctgcatattgaatccagcatgatgacgccggtcacttttgaaaccgctaccctgccgcgcggcctgacgaccgttatttgcgaccctcatgaaatcgtcaacgtgatgggcgaagccggattcgcctggtttgcccgctgtgccgaacaggcaaggcaaaaccagtacttacaggtcagctcttgcgtacccgccctggaaggctgcgatgttaacggtgccagttttacccttgaacagatgctcgcctggcgggaccatccgcaggttaccggccttgcagaaatgatggactaccctggcgtaattagcgggcagaatgcgctgctcgataaactggatgcatttcgccacctgacgctggacggtcactgcccgggtttgggtggtaaagaacttaacgcctatattactgcgggtattgaaaactgccacgaaagttatcagctggaagaaggacgccggaaattacaactcggcatgagcttgatgatccgcgaagggtccgctgcccgcaatctcaacgcgctggcaccgttgatcaacgaatttaacagcccgcaatgcatgctctgtaccgatgaccgtaacccgtgggagatcgcccatgaaggacacatcgatgccttaattcgccgcctgatcgaacaacacaatgtgccgctgcatgtggcatatcgcgtcgccagctggagcacggcgcgccactttggtctgaatcacctcggcttactggcacccggcaagcaggccgatatcgtcctgttgagcgatgcgcgtaaggtcacggtgcagcaggtactggtgaaaggcgagccgattgatgcgcaaaccttacaggcggaagagagcgcgagactggcacaatccgctccgccatatggcaacaccattgcccgccagccagtttccgccagcgactttgccctgcaatttacgcccggaaaacgctatcgggtcattgacgtcatccataacgaattgattacgcactcccactccagcgtctacagcgaaaatggttttgatcgcgatgatgtgagctttattgccgtacttgagcgttacgggcaacggctggctccggcttgtggtttgcttggcggctttggactgaatgaaggtgcgctggctgcgacggtcagccatgacagccataatattgtggtgatcggtcgcagtgccgaagagatggcgctggcggtcaatcaggtgattcaggatggcggcgggctgtgcgtggtacgtaacggccaggtacaaagtcatctgccgttacccattgccgggctgatgagcaccgacacggcgcagagcctggcggaacaaattgacgccttgaaagccgccgcccgtgaatgcggtccgttacccgatgagccgtttattcagatggcgtttctttctctgccagtgatccccgcgctaaaactaaccagtcaggggctatttgatggcgagaagtttgccttcactacgctggaagtcacggaataataaaaaaagcccggcgtcatgccgggcaaaagtcaccagttacgtttatgccactgtcaactgctgaatttttttctcgcggcggattttgcgttcttccattaccgccactatcgccatcaggcagatacaaccaatcgcggcgatatccagcgcggcgaaggtgcctgcccagccggtaaggccgaataccggcgtcccatcggcaatcattcccagacctaacttggcaaagctgtcaccaatcaggtaagcaaaggtgcctttaataccatcggcagcgccaatcgcttttttaggtacaaagccaacagcagccacaccaatcaacaattgcgggccaaagaccaggaaacccaacgcaaagagagaagccagatagatatattcgttactggcatgttgatacacaccgagcgtggcgataatcagcgccagcgcgatgcaggccaccaggccacggcgaccgttcgccaggtcagagagccagccccacagcagcgtaccgaccagcgcaccagcttcaaacagcgtaaagccctgaatcgccaccgctttagagagtttcagttcctggaacgcgtatacggtactccactggtcgataccaatacgtaccacatagaggaaaatgttggcgaagcacagcagccagatcactttgtttttcagcacatactcaacaaagatctgccacttggtcatatcggtagattctgtctctttgtcctcttcgctgatctcctcgccgaacagttcttcagctttgccgaggccataagattccggggagtcgctgccgtaacgcaggccgataaaaccgacaatcagcgcgataatgctcgggaagataaacatgccgatgacatggccatcgaacaggtaatttgccccgaacagcgccacacctgctgcgcctgcaccgccaaggttgtgagaaatattccagaaaccgaggaatgtcccgcgtttacgacgcggcgtccatttggtgatggtggagtaactgcagctaccgccggtactctggaaaagccgcttaaggcgtagaaggcaatcatcaggaacaggctaacgctgccgctgcccatactggcactgaagcccagcatacaaatagcagagaggatcagcatgaacggcaggaattgtttggtgtttttgccgtcggcgtagtaggaaaccagcgttttacccacgccataagtgatggagaaacccaggccgatcatccccagctgcgtcatgctcaacccgtaggtgctaatcatatcgttctgcgcgatgttaaagttcttgcgaatcaggtacatcgtcaggtagccgataaagaccaccaggtaggattgcatgaacggtttgaaccacattttgcgccgcacttcgagcggaaggtccagggtcggcttgcgaacctggtttaagaaagccagcatgggttactcctgaaatgaatacctgcgtgaggcatgcattgtaaaaatcagcagcaaatcaggcctgagatagcgtccaggcaaaacctggaaaatttcttagttttgccggatatgaagtgaaaaggtgagatgcatcacgcttcgcgcggtgtctgggcgttcaaaaagggcagtaacagcagtgcggaaatcccggcggcgatagagataaccacaaaaaatccgctccagtgccaggtatcgagtactttcgccagcggccaaccagcaaggctcgcccccagataagcaaacaagccgacaaaccccgtcgccgcccctgccgcctctttgtgggaacactctgccgccgccataccgattaacatctgtgggccaaagacaaaaaaaccaatggtgaagaagcaggttgcctgcatcacgtagctggcaaatggcatcagccacagggagccgacactaagcaaaattccggcggcgaaaatcaaattcatcggccctcggttgccgttaaacaatttgtcgctgccccaaccggctaccagcgcaccgataaatccgcccagttcaaacatcgtcactgccgtattcgccgtgaccagatcgacgcccagtgtctcggacatatacaaattgccccagtcgttgatcgccgcccggaccacatagaccagcacatagcaaaagctaagcagccagatatacggattcagcaacacatatttggtgaggatctctttacgcgtcaaccctgccccttcttgttgttgagcaatttccagcgcgtcgtgtcgccattcaccgaccgccggtaaacctaacgcctgcgggcgatcgcgtagccgccagcagagaaaaatccccacgactatcgccatacaaccagcaatcatcatcccggcacgccagccgtaatgcagcgcagccgctgccatcacaatgggaatgagtgcgccgccgacgttatgcgccgtgttccataatgcccaccaaccgccgcgctcggtacgactataccaggccgttaacagacgcgcacacaccggactaccccagccctggaaaaaggcgttcagcacccagagcacggcaaacgcccataggctcgtgctgaagccaaacagaatgttgataatgcccgtggcgataagccctatccccataaaataacgggcattactgcgatcgctgacaatgccggagacaaacttgctcacgccataggtaatgtaaaacagggtcgctaacaggccgatatcgctacggctgagcacgccgttagcaaggatttctggtacggcggcgttaaaacttttccgcgtgaagtaaaacagcgcgtaacccagccagatggtcagcagaatatgccgacgccagtagcgatagcgggcatcaatttcatatttatcagtcattaatggcgcatcggcaggcgctttcagaaacggcaacatcatcaaaccttagacatagcgttgaggtagagaaacgctgacacgcgtgccgtgcagacaggaaatgtgtaatgtgccacccagcgccgttacgcgctcgcgcattccggtgaggccaaaaccttgttgcccggaacccggcggcaaaccgctgccatcgtcttcaataaccagcatcaaccgttcatcctgctgccagccttgcagggtgaccgcgctggcatcagcatgtttcacaatgttgttcagcccttcctggcagacacgaaacagcgtcacgcgctggttttcgcttaacgcactttcatcgattcgccattcgagatggctgacaataccgcgcccttccagctccatttcccgcatcagactgcggatggcctgctccagggtgagatcatccaactggcgcggacgtaaccgacccaacaaacggcgcaccgcgtcgtaaacgcccaggcttagttgttcgatgagctgcccgctctgcttcacgctggcgttatctgccgccagccgctgaacaatgcccgcctgagtacgaatagcagtgatggtctgaccgatatcatcatgcagctcacgcgccacatcacggcgcacgctctcttcggtttccagcaaccgttcagccagatgctgattgcgcgccagttccttttgcaggctctggttaagttcacgcaaccgctggatgccagcgccaagcaacaaccctgtcagactttgcaccagcaggctgagcaataaatccaccggatgatcgcgccaggtttgactggcgatcagcgcgatggcgttcatcaacgtcgcaatcagcgccccttgccaaccatagtgccaggccagcgcgataatcggcagcgccagacagaatggcgtaaagcggctcagttcgtccggcaatcccaactggagccagagactgataacaaacagcagcaagtaccagaccagatgtcgcccgcgccagttgattggctgagaaaccagactcggaccgagcggcagccaggtgttattggcgagatagtgccagaacaccagacatatcggggccagcgtcaggccgccagttaaagtcagcaacagcgcattccagctctctttgccgtgccaaagccagggcaggctctgcaacaacgccgccgccgttaacgccgccccctgtaacagcaaggtgcgccagtcacgctgatggcgatagcggctgatcagcgctacgggcagtaacgtcagtaaactaccgatcatcaataacggaaaatgggttaaaccgaccgcctgcgttagccagtaaatcagcagccactccgcgcccagcaatacgggccagtatccgcgcgggcattgcagcattagccccagacgcagaccaaacggaaataacagcaccgccatatcagggcgctcaaccagatgcaggctgatactccacaggcaaaaccatgcggcagagaagataaaaaagcaggcaataacggtaattaagcgggagaacaacgtcttcatcaccagccatcaaacatgcggcgcgccagctctacgtcgttactgacgcccagtttttccatcagattggcgcgatggacgtgtaccgttttcggactcaagcccagttcggcggcaatctctttcaccgccattccttgcgccagtttttccgccacctggcgttcacgtttggttagcgggtcctgacgaccggatgccagtttaatggcaatatccggcgtcagataacagccgcccgtggcaaccgtatgcaccgcagcaatgagttcatccgggctacagcgtttggaaagaaagccgcgtgcccccgcgttaagcgcctgctcaaccagcgcaggactgtcgtgaacggagagcataatcgtcgccatacctttcggcagctggcttagcagctccagaccggagatatcgggcatggagatatcgcaaatacacacctgcacaccgcgccccggcagccccgccagcgcctcgcgcccgctaccaaactcggcaactacctgcaaatcaggttccagccccagcagctgcgcaaagccggagcggacgatgaggtgatcgtctataagggcaacggtgatcatggtcttgtcctggcgggtaaaaaaaatacgcgcttaccttaacgataagcgcgatgttgttcaagccttgagcggttactgaaaaaacaccgcgatcttgttaaacatcgtcggatcggactgattacgctgcactttcacgacatcttccagcttatcgatttggcttatcatctgctccagacgctggtcgtcattgaccagtagccagatatggcttttgtcgctgtcctgaatcggcagacaaagaatgccttcaacgttaaaagcgcggcgggcaaaaaggccacaaacgtgggtcattacgcccggatggttgcgaacggtgagctccagaattacgttgtcatgagttgtgttttgcatggcttattcccccaccatttcagtattcgccgcacctggcggcaccatcgggtaaactttttcttcggcatcaatgcgcacatggatcagcgccgggccagggcgattgatgatttcctgcaaactagcctgcggatcggcttcgttattcaaatcacaggtttcgaggccgaatccggcggcaatctgcataaagttgattttgcccggataggtggcggcaaaaacgccttgctcgtagaacagactctgttgctgatgcaccagccccagcgcttcgttgttcatcagaatgattttgacatccagctgattttcactggcggtcgccatctcctgaatattcatcatcaggctgccgtcgccggagaaacacaacactttgcgatccgggttcgccagcgcagcgccaatcgccgcaggcaggccaaaacccatcgtgcccagcccaccggaggtcagccactggcgtgggcgattgagcggataagcttgcgcggtccacatctgatgctgaccaacgtcggtggtgataattgcattgtcatcgacacaggcggcaacggcgttgatcaggccgtaatggcttaacggatcgcacgctttcgggattggacacggaaactcacgctgcaaatccgctaccaactggtgccactctgcacgcggttgcgcttccaccagcgggatcaactgcgccagcacgtcatcaacatccgcctgaatcgccacgtgcggctgcttgattttacccagctctgcacggtcgatatcgacatgaatgattttggcattcggacagaactgctcggttttgccaatcgcccggtcatcaaaacgcgcaccgagcactatcaacaaatccgcctcctgcaaaatatagttggtgctgcgcacgccgtgcatccccagcatacccaggctcaacggatgcgcttttggcaacatgcccagcgccattaaagtcatggtggtaggcagttgcgctttctccgccagttcacgcacccgtgcgggcgcattgatcacaccgccgcccagataaagcaccgggcgtttggcagcgttaatcatcgccgctgcgtcacgaatgctttcttcgctaaaggcgggggcggcggctttttctgccatagcgggctgtgtttcaatctcaaaaactgccgtttgcacatccttaggaatgtctatccacaccgggcctgggcggccactttgcgcaatgcggaaggcatcgctcatgacctgcgggagttcttcgatatgtctgaccagatagttgtgtttggtgatggggatagagatgccgtaggtgtccacttcctggaaggcgtcggtgccgatcatgctggcgggaacctgaccagtgatgcaaatcagcgggatggagtccagccgcgcatcggcaatggcggtcaccaggttagtcgcacccggtccgctacaggccatacagaccgccggtttaccgtcggtgcgcgccattccctgagcgataaagcccgcgccctgttcatgacgggccagaatatggcggatttgcgtgctttggcttaaggcatcgtaaacaggcaggatagaaccgcccggaatgcctgtcacaatcttaatgccctgctgttccaggaaatgaacgataaattctgcgccggtaaagcgcttacgcgtgcttgttgtgccgctacttgccatgctccagtccttttcttctgggccgactttccgggaggtgcttaaacgaaaaaccccgcccggtttgcgccggcggggttttggaatcgtgtgttgttccagtccttacggcgcattgccgacgaccaccaccacacgcacgacgaccactgcggcggatggcgcagttggtagtagttttgcgttgagcatggaagtagtcattggggaccttgttggttttgtgtttaacaatatttatacaagcacagctttacaggggagacaatggaaaatttttcagcaagggaaaattgaggggttgatcacgttttgtactgaattgcagataacaaaaaaccccgccggagcgaggtttcgtcagtcgcctgcggctggtaaccgcaaagcacactgtattatgtcaacactgaaagtatacgtgttccgcgcagaacgcgcaatttcggcacgaattttgacgtatttagtgcatagttgagtatcgatcacagtttgcgttttgtccaaatattactgtttatttatacagtaaacttctataatatcactgtacgcaatgtgttatgcgggggccgcatcgttacccggcgcactaagttctggctgaaacgggtggtgccgtcagcgccttaaccccgcgtgagcacactgtgttatgtcaacaagcacaacgtttctccttgagataccgcgtgcacaacagctggcaacaggcagcggaaaggtacgtcagctggcagtgctcctgaaccacaggagacgcgtatgaacctggtggatatcgccattcttatcctcaaactcattgttgcagcactgcaactgcttgatgctgttctgaaatacctgaagtaattcagattcaagtcgcaccaaaggggagcgggaaaccgctccccttttatatttagcgtgcgggttggtgtcggatgcgatgctgacgcatcttatccgccctaccatctctcccggcaacatttattgccgcttttgtttacatattctgccgctaaacaattccccattcctggcgtatatctggctaacattcatcaatgtgatagattcctctcccgcatttatgggaatgcgtagtgacttattctaattatttttataaaagcatccgtgataatgaaaaggcaaagaaacgtcaatttgttattgatgttggtattactcgtggccgtcggtcagatggcgcaaaccatttatattccagctattgccgatatggcgcgcgatctcaacgtccgtgaaggggcggtgcagagcgtaatgggcgcttatctgctgacttacggtgtcagtcagctgttttatggcccgatttccgaccgcgtgggccgccgaccggtgatcctcgtcggaatgtccatttttatgctggcaacgctggtcgcggtcacgacctccagtttgacggtgttgattgccgccagcgcgatgcaggggatgggcaccggcgttggcggcgtaatggcgcgtactttaccgcgagatttatatgaacggacacagttgcgccatgctaacagcctgttaaacatggggattctcgtcagtccgttgctcgcaccgctaatcggcggtctgctggatacgatgtggaactggcgcgcctgttatctctttttgttggttctttgtgctggtgtgaccttcagtatggcccgctggatgccggaaacgcgtccggtcgatgcaccgcgcacgcgcctgcttaccagttataaaacgcttttcggtaacagcggttttaactgttatttgctgatgctgattggcggtctggccgggattgccgcctttgaagcctgctccggcgtgctgatgggcgcggtgttagggctgagcagtatgacggtcagtattttgtttattctgccgattccggcagcgttttttggcgcatggtttgccggacgtcccaataaacgcttctccacgttaatgtggcagagcgttatctgctgcctgctggctggcttgctgatgtggatccccgactggtttggcgtgatgaatgtctggacgctgctcgttcccgccgcgctgttctttttcggtgccgggatgctgtttccgctggcgaccagcggcgcgatggagccgttccccttcctggcgggcacggctggcgcgctggtcggcggtctgcaaaacattggttccggcgtgctggcgagcctctctgcgatgttgccgcaaaccggtcagggcagcctggggttgttgatgaccttaatgggattgttgatcgtgctgtgctggctgccgctggcgacgcggatgagccatcaggggcagcccgtttaagcgcacgtcaccgcagcatcgtcatcagctccatgggagaacgatgctgctttatcagatcacgcatcacccgcatatgcggtgcggagtaagaataaaacgcctgatagcccgcacaaagcacgctgtctggcgtctcctgccgagcgtgcgggcacaggcgatgccagtcgcacgcctggcagtcacagcgcggttgcgggttttcgctgccacaccatttttgtaaggtggcgtcaaaaagctcaatgctgatacgactgatatctgcccgcacccaacactcgaacagggcaattaaaaatttcccccacagctctgctgtcacgctagcggccgtcagatcgccccggtcatcaaattcaagatagggaatgagctgtacggagcggatgccccgctgtttgaaattgtgataaaaatcggcaggttgcagagcatccttgtactctacaaccagtttatgcctgtcctcttcagcatcaatgacctgacttcctgtcatgcgactctctcaataaatacgataagttgatgtatatgcgttacagcaaacagtattgcgagagataacaccgcgagggagatcaaaaatttgtcacggactacgtgaaattgggaaaaatcgctattcgtgacatccattaaattgcgattacgggtgtagtgccagaggatcagcgccacgatggcgagaatgccaatgctaatccagaataacatgcccgcctggtgccagttgtgtttgatagccaacgccatcaacgcgccgtagcccagcatggtacgaaaccacgccagacttgtgcgctccggctgcagtcctgggtcggcaatgcgtctggctttgcggctatccggcatacaacaccagtcccataacgttaattatccggcatacaacaccagtcccataacgatcaccgccacgaccatcaatattaagctaatgattaataagctgttggtgtagggcaggtcctctttcagacgcatcgctttttcattgcgtaaccagcgcaagtagccatacatcgctaacccgccggaaaacagacacaacaacaacgccagcagttcgcgaatgacgggcgtggcgaaatctggcgcaagttgatcaagcccaacccccgccgccagaaatcctagtgcagtacggatccacgccagaaaagtacgctcattagccaggctgaagcggtaatcaggcgcttctccgaggcgggaaattttcattgttgctcctttgcaatttcactaacgctctacctttagcggtttttttaagaatttcgtccgcccgtttcctgatatgcttttgccatccgctacaaggaggtcagatgggtatcatagctcaaaataaaatcagtagtttgggcatgctgttcggtgccatcgctttaatgatggggattatccactttagtttcggccctttctccgcaccaccgccaacgtttgaaagcatcgtggcggacaaaacggctgaaattaaaagaggtcttctcgccggaataaaaggcgaaaaaattaccaccgtggagaaaaaagaggacgtagatgtcgataaaatcctcaatcaaagcggtatcgcactggccattgctgcgctactttgcgcatttattggcggtatgcgtaaggaaaatcgctggggcattcgcggcgcgctggtttttggcggcgggacgctggctttccataccttgctttttggtatcggcatcgtgtgcagcattttgctgatattccttatcttttccttcctgaccggcggtagtctggtttaagcagcctgaataatgcccgccgggtgatcatcagcgggcattatcgtcagaacttctgttttttctcctccaccttcaccccttgtgtcggtaggccggtgtcatagtcgcgtacaactgggctatagccatcttgtggacgtggacgaaacgccccatccagcgcggccgtgcatctttacgccacggacgcagactccattggtaactgcggaacggatcgcgaattttgtccatgtaatccaataaggcgtcatgcattttgctgcgaacgtctgcaaaacggatatcatcgatcaggttatgcatttcatttgggtcattacggcgatcgtaaagttcatcactggtgaagaggttgagtaccagtttaaagtcatccgtcacccagcaacgcaccggaataaaaccgccaaagctgtcatgctcaatctcgtagcggttaaattccaccatcacgccgcgtggctctttcacggcaaggatattttcccccggcagaatctctggtttttcaatatctgccagcgccatcattgtcggcagtaaatcgatatgactgactggcgtatcgacctgtcgccgctccccttgcgggctacggatgatcagcggaatgcgggtgatgtcgtcatacatcgccgcccctttactgatcagcttatgtgcgcccatcatttcgccgtgatcggaggtataaataacccacgtattttcacgttgctctggcgttaaggcattgatgacccgtccgatttggtcatcaacaaagtcattacaggcaaaatagagcggatggtgataaagcccgtcatcaccgactgggcttggcatcgcctgcgcccataagcggtgatgttccggtttgttagccaggtcatcctgtgctttctcgcccagctcgtagtaaaaatcagcgtatttctctaaatactccaccggacaggtgaacgggtgatgcggctcatcatagctaaccaccatcaggaaaggctcgtctgcgcgcgcaggctgttgcagaaaatccaccgcccgattgctgatacgatgcgcccaggtgaaggtttcgtcgatatggttcgcctgtaaatcttcgacgctgtttaggccattgcgccacaggctaatctctttttccgtcagttcgctaagatagttcgccccatcgaaccagtaatcagcgtcccactccggcggacactcgccagtgccgaaatagtcatgaccgtcgagatgccatttgccgatgtaacaggtgtgatagccggcatccttaaagtagcgccccatagtggagatgtttttgcctggcgcgacgttgttggtccacgggccggactggttagcgtagataccggtaaatagtccggcccgtgcaggcgtacaaaccggactacaggtgtaggcggaattaaagcgaataccttccgccgccagactatcaatattttgcgtattcagcggtttaccgctatagcaaccgaccatattggtggcctgggtatcggtcatgacgaacagaaaattggggcgtttcataggctatccttcccgtcgggagtaaaggttacggctgggtcgtgacgatgccgccagctgtcaaaaatcaggtagacaatcactacggcggcaatgaaataactgatcatcgctaaccagcgcgtaccgtagccgccgaattcagccagcccggcatagacgccaatcatcgcgaacaggatgccaatactcgcgatcttgacgtttttccacggtttcatgtccaccgcaaacgcatctttgaaggtgaacggcgtggcgcgcggtttgataaaaccgatcaccagcatcacgaccacgttgatgcagaacgtacaggccagcacatagaggaaatggaagtcgaacttcaccagatagttgatggtgatgtagctgattatgccaatccccatcgctacttttgccgccagcgccgggatgcgcgggaagaaaaagcccataatgatgatggtaaccagcggcacgttgtaaatgccgttgagctgtttcatccagctatacagcccctgcggcgcgttggcgatccacggcgcgaccagcacgctaacgatagcgataaagaaaccaaatttgcgcccgacggtgaccagctgctgcggctcggcattctggttaatgatgcgacggtaaatacccatactgaataacgtactggcgctattcagaaagccgttgaaggtactgatcaccgcaccaaataacaccgcgccgaagaaacccaccattggcactggcagaacgttattgaccagcgtcgggtaggccatgtcggctttcggtaaatcctgatacagatgaaacgcaatcaaccctggcagcaccagtaccagcgggtcgagcattttcagcaccgccgttaacagcgcccccttttgcccttccgccaggcttttactcgccagcgtgcgttgcacgatgccctgatttgtacaccagtaaaaggtgttcaccagaatcaaaccggtaaatgccgcgccaatcggcaagggatcggtcgggccaccgatactgtttaatttctcggcgtgaacggtggtgagttgctcaatgccctgcataaagctgcccttgcccatcgcgattaggccaaataccggcaccatcaacccgccgataaccagcccaataccgttgatggagtccgccactgccattgcgcgcagtccgccgatcaccgcatacaaaattcccgccagaccaagcaaaattaccagtagccagatagccgcaccgtgagaaatctgtaggctttccccgacgtgaaacaggctgttgagcgccaacgcgccggagtagagaacaatcggcagaaagcagacgccggtggcaattaggaagcagaagtcgatgataatacgcgtcgttttatcataacgttcctccagaaaatcggggatggtggcaatgccgcgcttcagatagcgcggtaaaaagattagcgcgaggaagatcagcgtcaccgcactagtcacttcccagcccatcacgctcatgccgcttttgtaggcctgcccggaaaggccgaccagttgttccgtggaaaggttggttagcattaagctagcggcaataaccggcgcttttagactacgtccggcaagaaaatagccttgttggcttccggtatctgttttgcggaccttccaccaggtgatcaccgccaccagcagcgtaaaaccgacaaaactcaagatttgtaagctattcatctcatagcccttatttatgtttatgtcccggacgcatgaatatagggagaggtaaaatgcgtcgggtcaggcagtcagattcttaaaatacaaacgtcgtatccctgaacggattgttttctgttaagttcaggttgtgagcataattcgccggagggatattaaaatgaatggaaaattgcaaagtagtgatgtaaaaaacgaaactccgtacaatattcccttattgattaacgaaaatgtgatctccagcggaatttctctgatcagcctctggcatacctacgccgacgagcattaccgggtgatctggccgcgggacaagaagaaaccgcttatcgccaacagttgggttgcggtgtataccgtacaaggatgtgggaaaattcttttaaagaatggcgaacaaataacactgcatggcaactgtattatattcttaaagccaatggatattcactcttatcactgtgaaggtttagtctgggaacagtactggatggaatttacccccaccagtatgatggatattcccgttggtcagcaaagcgttatttataatggcgaaatttataatcaggaactcaccgaagttgctgagttaataactagtccagaagcaataaaaaataatctggcagtcgcttttctgacgaaaattatttatcagtggatttgtcttatgtacgcagatggtaaaaaagatccacaacggcggcaaattgaaaaattaattgccactttacatgccagtctgcaacaacgctggagcgtagctgatatggctgccacgatcccctgtagcgaagcctggttgcgtcgtctgtttttacgctataccggcaagacgccgaaagaatattacctcgatgcgcgtctggatctggcgctaagcctattaaagcaacaaggaaacagcgttggcgaagtcgctgatacgctcaacttcttcgactcctttcatttcagcaaagcctttaaacataaatttggttatgcgccgagtgccgtgctaaagaatacggaccagcacccaacggatgccagtccacacaattaacgtaactctggccagtacgctttgttggcctccagcaactcatccagaatagctttggcgacgctggcgctcggtaccgttttgctcaacgtaatcgcctgccacaggtgctgataactacgctgttcccaggcgtccacgaccagtttttccaccgccacttgctgactcattaaccctttctgaaactgcgggatatcgcgctccaccagtggttcaggccgtagtagcgcacgcgcatctgtttgcgatcttgcagcccaacaatttgcgccatccggctttcaataccgattggcatgtcacagatgttgaggattttcgcattcgggcgcagacgacgcgtggcttctgcgacaatggctgccgggttggagtagttgagcatccaggcatttggactatatttttccatataatccaccagttccaggacgccgccaatggaacgcatgccgtacgctattccgccgggtccgcaagtttcctgaccaacaacgccgtggcgcagcgggattttttcatccagttcgcgcatcgggtatttgccgacgcggatgtgcgccatgacaaaatcaacgtcgctgaatgccacttcaggatcggtggtgtaactaaacgcaatgtccggcgctttttctttaaggatgactttacaggcttcggcaatcacttcctgccgcgcaccatcgttatcataaaatttcagtgcacgaagcgggaaacggtcctgattcgccaggagcatcaacacgatgcctggcgtaaaggtgcttccaccgcctgcgacaaccacactgaatttggtcattatactgcctccgtaatggcaacattttctgcactttgatgagaattaattaagctatcgagctgttcacgcagctgagatacatgcagaccaatgatcacctgaatggcatcgccactacggaagacgccgtgcgctcccagctttttaaagacttcgtcatccagcgtttgactcatgtcatgcagtgcaatacgtaaacgcgtcgcgcaattgttaatgctggagatattgccgaccccgcccagggcttgcaggataccggcagcctgatccagctcttttttttggctctgccgcggtggtttggcctcggctggctttgtattcggctttactgtagagtttcacttccgcatcttcacgtcccggcgtgcacatgttgaactgcagaatcagtgtgcggaaaaccacgaagtacagcagggtaaagcacaacccaatggcgatttgggtcagcatcatatccgcgtggttgctgaacatcgggatccagttttgcggtaaaacttagtcaatcagacctccgcccatgttgcccaccacaccaaagagatacattacggtgctcatactggccgccagcacggcgtgtaccgcaaacagcaacggactaatgaacaggaaggtaaattccagcggttcggtaattcccaccagcatggcggttaaggttgcgggaatcagcaagcccgccacttttacccgattttccggtgcggcagtgaagtacatcgctaaagaaatgcccacggcaccaaagattttactgttaccgtgcagggcaaaaccgccttccgggaacaagcttttcagcggctcggcgctcaaactgaactcttgcagatgctgcgcccagtacatctgaatgccgccttcaacagctgccggaccaaagataaactgtccgtagatgaagtggtgtaaaccggttgggatcagaatacgttcgaggaaggtgtaaacccagaccccaagtgcacccgcgctacgcaggaacgcttgcagagattcaatccccatttgtacttttggccagccgagcaacgtcagccaggcacaggggatcatcaccaggaaggcgataatcaccacataagacgtcccctggaaaatgccgagaaaaaccggcagttttttatcgaacagacggttatgcagcgccgtcacaatgccggaaatgataattgcgccgataatgctggtatcgagggttttaatcccggccatcattgtcagaccgctacctgccaccgcgtcctgagtgaaatcgacgccgaagtagcttccccaggccattcccatcgcgttgatgaaatagttccaggtcaggaaactcaccatcaccgccagacaagcacgcccctgcgcttgcttagcaaggccaatgggtaaaccgacagcaaaaatcagcggcatattacggaataccgtccaaccgccctcttcaataatgtgtacgatttgcgcgaataaactgttcggatcggtcagactttccccgacaaacatcgggttttgcagcaagatggcaagacccaccacaatcccggcgaagggaaacagcagcactggcgtgaacatcgcgccgccaaagcgttgaatttgactgagcatttccacatcctcttttctcaattctgtaagtaggaagcctgattggttatgcggcaggcctggagcgaggataggaagatgcgatcggcagaacatgacgacccaatgggattcgtgatcgctttcatgcttttcgttgggcggtagagatctacgttttcgcgaaaaagtagacctctgtgagcacaggtacacagcatcgaacacatctttaaaaaaaagatgttttttcaatcgattaagcagaacttgtgtgcgcattacccgggcttgcaggcaaaaaagagatctagagatgatctacaaaagcattgcggagcggttaagaattcgacttaactccgcagatttcacgctaaacagccttcttcccggtgaaaaaaagctggcggaagagtttgcggtaagccggatgaccatccgtaaagccattgacctgctggtagcgtgggggctggtggtccgccgccacggtagtggcacttacctggtgcgcaaagatgtactgcatcaaaccgccagtctgaccgggctggtggaggtgttaaaacggcagggaaaaacggtcaccagccaggtgctgatttttgaaatcatgcctgcgcctccggccattgccagccagttacggattcaaatcaacgagcagatctacttctcccgtcgcgttcgttttgtggaagggaaaccgctgatgctggaagacagctatatgccggtaaaactgttccgtaatcttagcctgcaacatctggaagggagcaagtttgaatatattgaacaagagtgcgggattttgattggcggtaattatgaaagcctgacgccagtgctcgccgatagactgctggcgcggcaaatgaaggtagcggaacacacgccactgctgcggatcaccagcttgagttatagcgagagcggggagtttttgaattatagtgtgatgttcagaaatgccagcgaataccaggtggagtaccatttacggcgactccacccggaaaagagttaaccgatactccagaagagcaccgccagtaattggggggtgataatgcgcaggaacattaccaacggatagacagtggcgtaagagagcgccgccgcaccgctggttggatgaagattattagcaaacgccagcgccggaggatcggtcatggaacctgccagcatcccgcacatggtcaggtaattcattttggctaacatccgcgccagaatgccaacagtaatcagcggaacggcggtgatcagggcaccataaccaatccagcttagcccttcgccattgaccagggtattcacaaaatccccaccagatttcagaccaacgacgctgaggaacagcacgatccccagctcccgcagcgcgaggttggcgcttggcggcataaaccagtacagcttgccgatactgccgatacgcccgaggatcaacgccataatcagcggtccgcccgccagccccagtttcaacgcggccgggaatcctggcacaaagacgggaatagaacctaacaatacgcctagcccgatgccaataaacactggcagcatctgaacctgttgcagtttttgctgcgcattccccagcacattggcaacggcatcaattgcggacggacgccccaccagattgaggatatcgccgaactgcaggctgatatcgccactggcgaccagttcgaccccggcacggttcaggcggctgataacaacgtcatagcgttctttaaagtgcaggtcgcgaatacgttttccgagcacgttttcattggtgaccaccacacgctcgacgcgcaaatcagtgcctttcgtggacaggctagtatcgacctcctgaccaatcaccagttgcgcattatgtaaatccgctggctgacccaccagatgcagcaaatcgcccagttggataatggtatctgggctaggaacttttagggtttcttcgcgtttcagacggctgcagataattttgtcgccgttgagaatcggtacatctttaatggctaaatcatgcaggttagggttctcaacgcgaatattgatagtcttgatcagcgcgccgccattggtgcgactagactcgtgctgctgagcttctgtctcgacattgacgcggaaaataacccgcaacatccacatggtgaacaaaatcccgcaaatgccgaatggatacgccatcgcgtaactcatccccatctgatcgaccatttccattggtgtacccaggtcgcgcaaaatctgctgccctgcccccagcgctggcgtattggtaaccgcaccggagaaaatccccagcactaccggcagtggaatatcaaacagtttatgcaggatggcggtaaccagaccaccgatgatgacgatcagaacagcaaacaggttgaggcgtaatccggagacgcgcaaactggcaaagaagcccggccctacctgaatcccgatagtataaacgaacaggatcaggccaaattcctgaataacatgcagcatatcgctacttaatgtcatccccgcctgagaaacaaaatggccgacgatgatcccaccaaacagcacgccgccaatacctaatcctatgccgcgaaatttgacgttgccgataaacaaaccgacgactgccaccaaagccagaatactgaccgttaatgctatatcactcatcgtccatttctcttgagataacattttaattgctacggattatggctgaatcggtgaagcagatttgccttatagcgcacattatcacgggaaagaacgtgccgaaatatcttaaacagtcgaaatttaacgcattgttgagtaagtaagacaaaaaaagccccaccagaatggcggggcaaagagaatagctagttagctatttaacgcgggacgttcgctgatagcgatacgctgcgctgcgatgggttcaggctcattacgaattaaatcaatatgcagtaaaccgtttacgaaggttgcgccagagacttccatattttcagccagcgtaaagctcaggctaaatggctgattcataagcccttgatgcagccattttttctcttcttttggctgctccggcgtgccttttacgctcaggcgcgtaccttccagttgaatctctaaatcttcctgacggaaacctgccagcgcaagggtaatgcggtagtggttatcgtcgcttttctcaatgttgtacggcgggaagctctggctttcaccggcgttttgcagtgcgttggccagtttgtcaaaaccgatccattgacgcatcagtggggataaatcgaagttacgcatagtcatttctccttctaagaagcgagtaagtacctgcaaatccgaagattcgcatatgctccctgacggcgagcatggagatgtcaggccgcgccaggcggccttagggaattagttgatttcgatacggcgcggttttttcgcttccggaatcacgcgttcgagatcgatatacagcaaaccatttaccaggttagcaccacgaacatgaatgttctcagctaactggaatttgcgttcaaagttgcgttcagcgatgccctggtacagataggtgcgctctttttgttcgtcggcgtgagcacctttcaccaccagcagattatcctgggcggtaatttccagttcgctctcagcaaaaccagccacagcgatagcaatgcggtaatggttttcgtctaccagttcaacgttatacggagggtagccgccattactctggctctggttgttttctaagtggttaaacaaacggtcaaatccaatagcagaacggtaaagcggggataaatcaaagttacgcataatcaatagctcctgaaatcagcgagaatgtaagaccttccacaatggacaggtcaggtagccagaacacccatcaggcgcgtcctcatcggctacgatgtaaaaatgggtctggaaatgaacttttcaagccttatcagcggacttttttttgcagtttatggtctattgcatagactgagggggcagcacgaaacgttaaagtgcgatagccgccacagtgcgacgtaatgatgatgttattttcagcaagggatcgctataactcatcaggccaacacccacgatcaacagatgaatttattatgataagaaatgtgttgttagcgttcatgatatgcagcggaatgacattactcggaggatgctccagcgtgatgtcccataccggagggaaagaaggaacgtatcccggcacccgcgccagcgcaaccatgattggcgacgatgaaaccaactggggcactaagagcctggcgattctcgatatgccgtttaccgctgtgatggacacgcttttactgccgtgggatgtgttccgcaaagacagcagcgtgcgcagccgcgttgaaaaaagcgaagccaacgcgcaagccaccaatgcggttattccaccggccagaatgcctgataactgatttagcgatcagtttcggtgatccacagctggccgccttccatccacgccagccactgaccatccgggctgaagaccacggcgtccgcagaaggactattggcgtggtgttcggttaaatactcaacctcgccgctttgcgcatgggcacaagcaattcgattatccagcacaaagcccaaccattctccactcggatgccagttaaatgcagactgaatatccgttttgttatgggttaactggcgcggctcgccgccctgtgggctgataagccacagttgcacaatgccgttatcatctcgcattaaaaacgcgatttgtgtaccctgcggattacagcgcacccagtggcgcgggacgttgactaaccccggataagcccgatggtgggtaaaggttaaacgtcgctgcacgacgccacgcggtggcgcgggcagggttgtttccgttccgcttaacggcgcatcacctgccgctttccagccagcttcatcttgcggtaactcaacgataaacagctccggcactttctcgccctttgggctaagtgtgtcgccaataaatgccagcgcgtgatttcctacccatccttcttcataagcacgattgatttcatcactgccaggctgtggcgtgggcgtggttttgctcaccagcacgcaccagtggctaccgctgtattcacgcggatgctgcttttgtacgttgaccgggccaaacggcgcagcaacaccgacgtttcgcaaatccagcgccggatcgagttcatgcattacatggtcgttataggtaaagctcaccctttcaccgttcgggctaaagacatgcacatggctgccgccgcgcagcactcctggcgtatacggcgcggtaatatccatcgcatcaaggttactcatcttgccgccttcaacaatcactccgcgccgatgatggaagtcgtaatgccatgtttcatcaggattttccgggccgtggatgaaaacatatttctcactcttcggatgaacggtcaccacgccgacgtgtgcgccctgactcgcgcgatagataacctcgacctcgccggtatggatattcacacgctcaatggtctcgccggtaaagctcgcgccagaaggacgcacgtcaaataccagccactggctgtcgggcgtccaggtattggtattggtgagcaggtgattacggggagcaaaggttatctgtttcatggcgcggtcctgatacaaaacgggtcccgccatcatacttcacaaggacttcactttcagacaatagtcttttgccatcgtgatgaatgtgagtgaaaagatggaacatttcgacgtggcgattattggcctcggcccggcaggaagcgcgttggcacgaaagttagcaggcaaaatgcaggtgatcgcgctggataaaaagcaccagtgtggtactgaaggtttcagcaaaccctgcggcggtctgctggcaccggacgcgcagcgatcttttattcgcgatgggctgacgcttcctgtcgatgtgatcgctaatccgcagattttcagcgtcaaaaccgtcgacgtcgccgcaagcctcacgcgtaactaccagcgaagctatatcaatattaatcgccatgctttcgacttgtggatgaaaagcctgatccccgccagcgttgaggtttatcacgacagcctgtgccgaaaaatctggcgtgaggatgataaatggcatgtcatttttcgtgcagacggctgggagcaacatattaccgcccgctatctggtcggtgccgatggcgcaaacagcatggtgcggcgacatctctacccggatcatcaaatccgtaaatatgtcgctatccagcagtggttcgcggagaaacatccggtgccgttctactcctgcatctttgataatagcataactaactgttatagttggagtatcagcaaagacggttattttatctttggcggtgcctatccaatgaaagacggtcagacgcgtttcacgacgctgaaagagaaaatgagcgcctttcagttccagtttggtaagacggtgaaaagcgaaaaatgcacggtgctgtttcccagccgctggcaggattttgtctgcggtaaggacaacgcctttctgattggtgaagcggcgggatttatcagcgccagcagcctggaggggattagctatgcgctggatagcacagacattctgcgtagcgtgttactgaagcagccagagaagctcaataccgcttactggcgcgccacccgcaaactgcgtttaaaactcttcggcaagatagtaaaaagccgatgcctgaccgcaccggctttaagaaagtggattatgcgcagtggtgtggcacatattccacagttgaaggattaaccaacgcgcttcacatcgcccaccagcaggatataagagagcgcgccaatcaacgcgacggcggagatataaaccagtgcaggtgcgaaaccgtaaccctgcgccaggtaccccaccaccagcggaacggtgatgccgcccagaccaccggcgaagttaaacacgccgccggttaaaccaatcaggcgcatcggtgccagagaagaaaccaggctccaggtaatgctagcaaaaccgttaccgaagaatgccagcgccatcaggcacataatcatcatcggatcgttagtgtagttagcgcccataatgcaggtggagatcagcaagccgcagataatcggcgttttacgcgcaaagcccagactaaagcccttacgtaccagcagatccgctacccagccagagagcaggacgccgacaaacgccgcgaggaatggcaccgtggtcataaagcctgctttcagcgccgtgattcctttttcctgggttaaatagttcgggaaccaggttaagaaaaaccacagtgtagaagccaccgcaaattgcccaagataaacgccgatcagtttacgatggaacaccagtttccagtctttggctgttaacggctgacgcgcctctttcttcaccggcgcatcaccatccaccagaccgccgccatcacgaatgtaatccagttcagctttgctgatacctttggtcaggcgcggcggctgataaaccttaaaccaaatcaggctccagataatgccgataccaccagtgacaatgaacacccagtgccagctcaacatctcctgaatccagatcagcagcggcgtcagaaacgccagaccgacaaactgaccagacgtataaaaaccaacggcagaagcgcgttcatgttccgggaaccagctggtcaccatccggttattggtcgggaaagcaggcgcttcgaaaataccggttatcgcgcgcagaccaattaaactcattaagcccgtggcaaagccctggaataaagtcgccacactccagccaaatatcgcaataaaataagtcacgcgagaacctacgcgatctaaaaaccaaccgccggggatctgacatagcgtataaagccaggcgaaggcgctaaatacatagcccatttccgctttggtaatgccgaactcttcctgaatatgggcggaagccacggccaggttggcgcggtcgacataacaaatgactaccgtaataaagatcatcaccagcgtcagataacgccgacgccccggctttgctgcattaacgggaatatccatagcgagctttctccagattttgggcatagcgaagccgctcaccatgccctgtaatttacagagggttatatttttgtattgctgttttagtgcccgatgaggggcttacgtggcaggaattaccactctgctacgctgttatcttcatgacgccagagcggattacgccagtccggggcatttttactgaactcaatcactttagcttcgtcgatttccacgcctaagcccggtttcgttaacggtttaaagaagccgccgaccatgctgaagtcttctttgtttttcacaaagtcgagtaactccgcgcctttgttgtaatgaattcccatactttgttcctgaagtacggcgttataggaaacaaagtcgatatgcaggcaagccgccagtgcaatcggtccgagcggacagtgcggcgcaagggtcacgtcataggcttctgccattccggcgattttgtagcattcggtaataccgcccgcgtgggagagatccggttgcagaatgctaataccacctgcctccagcacgcgtttaaaatcgaagcgactgaacatgcgttcacccgccgccagtggaatatgcgtttgtgccgccagtttcgggtagtattcggcttgttccgccagcaccggctcctcaataaacagcgggcgatacggctccagttctttaatcagcactttcgccatcggcgcgctgacgcgaccgtggaaatcaagaccaaactcaatctgattgccaaaagcttcacgaatttgtgccacggtgttaaccgccgcatctaccgcgcgggagttatcaattagccccagttcttcacaaccgttcagtttgaaggtatcgaagccgatttcgcgtagcgttttaatgccgtcgataacatccgccggacgatcgccgccaacccaactgtaggctttaattttgtcgcgaaccaggccgcccatcagttgccagaccggcgcattcagcactttacctttgatatcccataacgcctggtcaatcccggcgatggcgctcatcaggatcggaccgccgcgatagaatccggcgcgatacatcacttgccataagtcattgatgcggcttggatcctgaccaatcaaatagtcacccagctcgtgaactgccgcttccaccgtacgggcgcggccttcgatcacgggctcgccccaaccgaccacgccttcatcggtttcaattttcaggaacatccagcggggaggtaaacgatacgtggtaattttggtgattttcattgcactgcctctcgatacgccttaacaaatgctgctgcctgctgcgcggtgcgctctacggattgcccggcgcgatagagatcgctgcctaagcccgcccctgcacaacctgcgtctatccactgcgccaggttttctggcgtcacgccgccaacggcaaagactgcgatgtcgcttggcaataccgcttttaacgctttgatgtattgcggaccaaaagcgctactcggaaatattttcagcgcctgcgcgcccgcttcgagcgcggtaaaggcttcggtcgccgtcgcgcagccggggcagacggtcatgccgtagcccaccgcacggcggatcacttcactatggatattgggcgtaacgatgagctgacagcccatcctggcgagcgcatcgacctgttcaggtttcagtaccgtacctgcgccaatcaacgccttgtcgccgtacgcatcaacgatggcgggaatgctttgctcccattgtggggaattcagcgggatttcaaccgcgtcgaacccggcgtcaatcaccgcgccaacatgcgccagcgcctcgtcgggcgtaataccgcgcaaaatggcgatcagcgggagtttagtttgccactgcatgagcgatgctccttataccagcctgaaatgccgtgtcgcccgccaccgccgtcacgtcgcaacccatcgcctgaaaggcttgctggtagcgcgcggtcaggcttgttccggcgacaagggtgatggcgtgttgatgggccacatagtcgcgcatactggcgacctctgcgccaatcaacaaaccagagagaaattcgctgacctgttcgcggggaagtgttcccagcacatggctggcgcgaacttcaaaaagctgcggcaatatggcgggcgtattaagaccacgctcaaggccagctgtgaaggcatcggcagagttttcctgcggcggcaaacctgcgccaatcaaactgtgatttaacagtaaatgatgtaattcaccggtcatcacggtgcgaaaatcgttgatttgctggctatcggcctgcacccatttgcaatgggttccgggcatgacataaagagaggaaggagccagagctcgcgcgccgatcaattgtgtttcttcgccgcgcatcacattgtggttatcgtcatgagagacacataatccgggaataatccagatattgtcgccaacactcgttaattgttcgccaatagagctaaaacaggcaggaacagataaatacggtgcaactttccagccgacgttgctgccaaccattcctgccattaccactggcgttttctcttcacgccagtcggtcgtgacttctgctaacaccgcagccggagattttccgttcaggcgcgtgacgcctgcttcactttgcctgctctccaggcagtggtcgccctgataaagccaggcgcgcagattggtgcttccccagtcaattgcgatgtagcgagctgtcatgtgatttcctttaaccttcgtgtgctgctggcgatcatggtaagcgccgcctgctctgccgcatcgccgtcctgatgtcgtatcgcatcgaacagcgccttatgttcctggagcgtttgcggcatgttggcctcatcgcccatccaggttcgttcaaaaaccgcccgctgcaggctactgatcgcaatgctaagttgctgtaacaccgggttatgcacgctctgcagcaccgcctcgtggtagcgaatatccgcttcgttaaacgcttcgcggtcctgattgttggcaatcatctcgttcagcgcgctttcaatctgcgccagatcgctggaagtcgcgcgctctgctgcccaacgggcaatcgccggttccaccagatttcgcacttcgctcatggcactgataagccgtgggtcgtagtcattttccagcacccattgcagtacgtcagtgtcgaggtaattccactggttacgcggtgccacaaacgccccgcgataacgtttcatttcaatcagccgcttcgccatcaggctacggaacacctcacggatgatgttgcggctggttgcaaactcctcacagagttccgcctcagccggaagcgggctgcctggcacgtatttgccgtgaacgatctgtttacccagcgtaatgacaatgcgatcggttttattgagagtcatggagagtccttgtgctctgtatgttcttctctactttaccccgatcgatgcataacgcggcaactttgtagtaccagcgtgatgacgttcgcgtttgccgtgcgtgtaatgtagtacaaacttatattgttgtactacaatttagatcacaaaaagaacaatgcataaaaaaatgacatgcgtcgggcagaaatctgaaaagggatatcaggcgctaaacaggagggaaagaagagtatgctttcaacggcttagctactcgtttaaaggattaatcatgaagttgaattttaagggattttttaaggctgccggtttattcccactggcgctgatgcttagtggctgtatcagctatgctctggtttcccataccgcaaagggtagtagtggaaagtatcaaagccagagtgacaccatcactgggctaagccaggcaaaagatagtaatggaacaaaaggctatgtttttgtaggggaaagcctggattaccttatcactgatggtgccgatgacatcgttaagatgctcaatgatccagcacttaaccggcacaatattcaggttgccgatgacgcaagatttgttttaaatgcggggaaaaagaaatttaccggcacaataagcctttactactactggaataacgaagaagaaaaggcactggcaacgcattatggttttgcctgtggtgttcaacactgtaccaggagtctggaaaacctaaaaggcacaatccatgagaaaaataaaaacatggattacagtaaggtgatggcgttctaccatccatttaaagtgcgattttatgaatactatagtcccagaggcattccggatggtgtttccgcagcattactgccagtgactgttacgctggacatcattactgcaccgctgcaatttctggttgtatatgcagtaaaccaataatcagtaagcgggcaaacgcgtttatgctgtttgcccgcccacagattaattcagcacatacttctcaatagcaaacgccacgccatcttcaaggttagatttggtgacaaagttcgccacttctttcacactaggaatagcgttatccatcgccacaccgacgcctgcatattcaatcattgcgatatcgttttcctgatcgccaatcgccatgatttcttccggtttaatacctaacacgtcggccagacttttcacccccgtacctttgttaacgcgtttatcgaggatttcgaggaagtacggcgcacttttcagcacggtatatttctctttcacttcctgcggaatacgcgcgatagcctggtcgaggatggcgggttcatcaatcatcatcactttcaggaactgggtattggggtccattttctccgcttcgcagaacaccagcggaatggtggcaacgaaggattcatgcaccgtgtagtagctgatatcacggttggcggtgtacagcgtggtgcggtccagggcgtggaaatgagaaccgacttcgcgagagagtttttccaggaaacgatagtcgtcatagctgagagcagtttgcgccacggtgctaccatcagcggccttctgtaccagcgcgccgttataagtaatgcagtagtcgcccggctgttccatatgcagctctttcaggtagttgtgcacacctgcatacgggcgacccgtcgttagcacgacattcacgccacgggcgcgagctgcggcaatcgcatttttaacggcgggactaatggtgtgatcgggcagcagaagggtgccatccatatcgatagcaatgagtttaatagccatgagttccccaggtagattggttcctgacccatgctaacgcgattccgctcaaaaatcagtacaacacccgagggaaaagggggatgcaacgcgcgttgcgtgctccctttttgcttagcggaagagtttccctttcagcagttccatgcctgcggaaagcagatcgttattggcttgtggactcacttcaccttgcggactgagcgcatcaataatcttcggcaattgttctgccagtaaactggaagctgtactggtatccacgccaagtttttgcccgagatcggacaccgcatttgtgccgagcgcgctttccagttgctcgccactaacgctttgattgccctgttgattactcagccaggtactgagaatggcccctaagccgccactttgcagtttttccagcagcacctgaatgccgccctgctcctcaacccaacttaaaatagcctgatatttccccgcatcgcctttcagaaaggcaccgacaacttcatcaaaaagccccatgataatcacctgtaaagcgttacgtgttgacccaaaaagtatagatttgcgggatgataattgcggattgcagaaataaaaagggcggagatgatctccgcccttttcttatagcttcttgccggatgcggcgtgaacgccttatccggcctacaaaatcatgaaaattcaatacattgcaagattttcgtaggcctgataagcgtagcgcatcaggcacgctcgcatggttagcgccattaaatatcgatattcgccgctttcagggcgttctcttcaataaacgcacggcgcggttcaacggcgtcgcccatcagcgtggtgaacaactggtcggcagcaatcgcatctttaacggtaacgcgcagcatacgacgactttccgggtccatagtggtttcccacagctgttccgggttcatctcgcccagacctttataacgctggatggagaggccgcgacgggactctttcaccagccagtccagcgcctgctcgaagctggctaccggctgacgacgctcgccacgttcgataaacgcatcttcttccagcaagccacgcagtttctcacccagcgtgcagatacgacgatattcgccaccggtgataaactcgtgatccagcggatagtcagtatccacaccgtgggtacgcacgcgaacaatcggctcgaacaggttttgctcagcattggtgtgaacatcaaacttccactggctgccgtgctgttctttgtcgttcagttcgctgaccagcgcgttcacccagcgggtaacggtctgctcatcagaaaggtcagcttccgtcaacgtcggctgatagataagctctttcagcattgctttcggataacgacgctccatacgattgatcattttctgcgtcgcgttgtactcagataccagtttctctaacgcttcgccagccaatgccggtgcactggcgttggtgtgcagcgttgcgccgtccagcgcgatagagatctggtactgatccatcgcttcgtcgtctttaatgtactgttcctgcttgcctttcttcactttgtacagcggcggctgagcgatgtagacgtgaccgcgttcaacgatttccggcatctgacgatagaagaaggtcaacagcagcgtacgaatgtggctgccgtcgacgtccgcatcggtcatgatgatgatgctgtgataacgcagtttgtccgggttgtactcgtcacgaccgataccacagccaagcgcggtgataagcgtcgccacttcctgagaagagagcatcttatcgaagcgcgctttctcgacgttgaggattttacccttcagcggcagaatcgcctggttcttgcggttacgcccctgcttcgcagagccgcccgcggagtccccttccaccaggtacagttcggaaagcgccggatcgcgttcctggcagtctgccagtttgcccggcaggcccgctaagtcgagcgcacctttacggcgggtcatttcacgcgcgcgacgcgccgcttcacgggcacgggcagcatcgataattttgccaaccacgattttcgcgtcggttgggttttccagcaggtattctgccagcagttcgttcatctgctgttcaaccgcgcttttcacctcagaagaaaccagtttgtctttggtctgggaggagaatttcgggtccggcactttcacggaaacgaccgcaatcaggccttcacgcgcatcgtcaccggtggcgctgactttggcttttttgctgtagccttctttgtccatgtaggcgttcagggtacgggtcatcgccgcacggaagcctgccaggtgagtaccgccgtcacgctgcggaatgttgttggtaaagcagtagatgttttcctggaagccatcgttccactgcaacgccacttcgacgccaataccgtctttttcagtggagaagtagaagatattcgggtggatcggcgttttgttcttgttcagatattcaacgaacgccttgatgccgccttcatagtggaagtggtcttctttgccgtcgcgcttgtcgcgcagacgaatggaaacgccggagttgaggaagctcaactcacgcagacgtttcgccagaatttcatattcgaactcggtcacattggtgaaggtttcgaggctgggccagaaacgcaccatggtgccggttttttcagtctcgccggtaaccgccagcggggcctgcggtacaccgtgttcgtagatctgacggtgaattttaccctcgcgctggataaccagctccagtttttggctcagggcgtttactacgctaacaccaacgccgtgcagaccgccggacactttataggagttatcgtcaaatttaccgcctgcgtgcagaacggtcatgatcacttccgccgcgcttacgccctcttccgggtgaataccggtcggaatgccgcgcccgtcatcctgtacagagacagagttatcggcgtgaatggtgacgataatttctttacagtgacccgcgagcgcttcgtcgatagcgttatctaccacctcgaataccatgtggtgcagaccggtgccgtcatccgtgtcgccgatatacatacccgggcgcttacgcaccgcatccagccctttcaggactttgatactggaggagtcataagaattgctcatcaacgtttctcgctcatttatacttgggttaatccgttattttacccttttccacggtaaacatcttgctattttcgtcgctcatgtctataacgtgttcagcactgatcgcgctgacaaagacctgactttgcgtcgcttttaagcggctggcaagcagcccgcgacgctcatcatcaagctcagaggcaaaatcatctatcaggtagagacaccgccgcccgctttcacgggtgaggaactctccttgcgccagacgtaaggcgcacatcaacagcttaagctgcccacggcttaaggtatcttccaccggcgcaccgtcggcgcgaatgcgtaagtccgctttgtgcgggccgtgcgcggtgtaggttagctggcgatcgcgttcaaaattacgttccagcacctcagcatattctgtctctttctcccagccgcgctggaaagagaaagtcagagaaaactcagggagaaattgcttacaggtatcagccatatcggccgcgataccggcgctatactccgcgcgccaggtgctgatttgctccgccagcgggatcagctctttatcccacgggcgtagctgttcgtaacgtgtcacctggcgcagcgccgcattgcgctgcttgagcaatcgcttgagattgctccaggcggtgaaaaatccgggttcgttgtgaaagcatccccagtcgaggaatgctcttctgtatttggggccgccgttgagtaaagtaaacccttctggcgttatcaactgcattggcatcaggtgcgccagttccgcgaccttatgcccgtctgtaccgtcgatgcggactttgctgtcgccctgtttgtctttggttaagccaatcgctgtctcgcgctcttcgccctgtaatcgcccgtggagaacaaacgcctcctgctcatggcgaatgacgcgaccaatctgcaaactgcgaaacgcccgaccatggccgagcgtatagatggcttccagcacgctggttttgccactgccgttggcgcctaccagaaagttaaagccgggagataaggcgagatccgcggtttcaatgttgcggaaatcgcggatcaacaagcgggtgagggacattacagtctcattggcatgacaacataagccgcgctctggctggccgcatcttcaatctgcacgctggaaacgctatcggtcagcatcatgcggacgttttcgcatttcagcgcgttcagaacatccagcacataactgacgttgaagccgatttccatctccgcaccgctataggtaacgtcgaggatctcttccgcttcttcctgttccgggttgttggcggtgattttcagctggttttcgctgacataaagacgtacgccgcggaatttctcgttagagagaatcgccgcgcgagcaaacgcctgcttgagcagatcgcagccagcttccagatgtttgtccgggttcttcggcagaacgcggcgataatccgggaagcgaccatccaccagtttggaggtgaagataaagtcgccaacgtgggcgcgaatgttgttgctgccaatctgtacgcgcagcggattgtcgccgccgtcgagcatacgcatcagttcaatcacgcctttacgcggtacgatcacgctatggcttggcaaagattgaccaattggcatactacagaccgccagacggtggccgtcggttgccacggtgcgcagttcttcaccttcggtttcaaacagcataccatttaagtaatagcgaacgtcctgatgcgccatagaaaactgggtcgcttcaatcagacgcttcatcgttgcctgcggcagggtaaattcgacttcactctgccagtcatcgaggttcgggaaatccgccgctggcagggtagacaggctaaaacggctacgcccggagcgtaccagcatccgttcaccttccagctgcacggcaatttccgcgccttcaggcagaccacggcagatatcaaagaatttgcgcgccggaacggtcgtcgctcctggctcgtgtggctgaaccagcgcaacacgtgccaccatttccatctcgagatcagtaccggtcaggctcaacgtaccgtcagcaacctgtaacagcagattaccgagaatcggtagcgtaggacgaccacctaacggaccgctcacctgttgtagcggttttaataaatgctcacgttctacggtaaatttcataggtttagctactcaatgttctgattaaattactaaaatcttctttgatatcgtggctctcttcacgcaactgctcgatcttacggcaggcatgaagcaccgtcgtgtggtcacggccaccaaacgcatcgccaatctccggcagactgtggttagtcagctctttcgccagcgccatcgccatctggcgcggacgcgccacgctgcgggatcgacgcttggaaaggagatccgcgactttgatcttgtagtactccgccaccgtcttctgaatattgtcgatggtgaccagtttttcctgcaatgccagcaagtcgcgcagcgcctcacgcacgaagtcgatggtgatcgcccgtccggtaaagttggcattggcaatgacgcggttcagcgccccttccagctcacgtacgttagatcgtagacgcttggcgataaagaacgccacttcgcccggcaaacgaatgtcgttttcgtcggcctttttcatcaggatcgccacacgggtttccagctctggcggttcgatcgccacagtcagtccccaaccgaagcgggatttcaaacgatcctcaacgccgttgatctctttcggatagcgatcgctggtgagaatgatctgttgattaccttccagcagggcgttgaaggtgtggaaaaactcttcctgagatcgttctttattagcaaaaaactgaatatcgtcgatcagcagtgcatctacggaacggtagtagcgtttaaactcttcgatcgcgttgttttgcagggctttaaccatgtcctgaacaaagcgctcggagtgcatataaaccactttggcattcggcttgcgcgccataatgccgttacccaccgcatgcagcaggtgagttttacccagacccgtgccgccataaaggaacaacgggttataggcaccgccagggttatccgccacctggcgagccgccgcgcgcgccagttggttagatttaccttcaacgaagttatcaaacgtgtgtttgacgtttacgttagaacgataggtcggttctgccggggccgggacgttatcccaaccactgcgcgtagaaggcgcagcacgttgcggctgcgtttgcgccacctgtgcaggggccgcgacgttgctcgtcactgccgcttgtggcgtttgcgtcaccggtttggtgccgacttcaaaacgcagctgtggggcatccgctccgcagaaactggttagcagtccattgatattattaaggtacttgtcccgtacccaatcgaggacaaaacggtttggcgcgtacagggccagcgtgttatcgctcagttccgcctgcaatgggcgtatccacatactgaattctgtggctggtaactcatcctgcaatcgggcaagacactgctgccaaaggctaagactcacggcggactccactcgaacaaaagtcgataatgactaaggctgaaacattcatgattgttgacgtacgtcgaaaagaccctgcttgagggtgacgcacgaaccgctgtctgcggttatatgcccgatcaagatcctgcaaaacgatcgggaccgcggatcatagcctaaactgcgcaagagatcttctgtttctcacagattttcccgatttatccacaggactttccagaactcgctaagtgtaaacgatcctgccgcgaggcgggcacgatttacgccgcatattggaaaatttaatgaccatagacaaaaattggcttaatcgatctaataaagatccaggacgatccttgcgctttacccatcagcccgtataatcctccacccggcgcgccatgctggtttccactggtgtgaggtcgtacattttccctgcgaaaaggtgcggaaaagcgcggtaaataaggaaagagaattgactccggagtgtacaattattacaatccggcctctttaatcacccatggcttcggtgtccatcgtttcatttttcggcggatatccaataaagccattgaatttattcaagtttaggtagaaatcgccatgaaacgcacttttcaaccgtctgtactgaagcgcaaccgttctcacggcttccgtgctcgtatggctactaaaaatggtcgtcaggttctggcacgtcgtcgtgctaaaggccgcgctcgtctgaccgtttctaagtaataaagctaacccctgagtggttaagctcgcatttcccagggagttacgcttgttaactcccagtcaattcacattcgtcttccagcagccacaacgggctggcacgccgcaaattaccattctcggccgcctgaatagcctggggcatccccgtatcggtcttacagtcgccaagaaaaacgttcgacgcgcccatgaacgcaatcggattaaacgtctgacgcgtgaaagcttccgtctgcgccaacatgaactcccggctatggatttcgtggtggtggcgaaaaaaggggttgccgacctcgataaccgtgctctcagcgaagcgttggaaaaattatggcgccgccactgtcgcctggctcgcgggtcctgacttaatcggaagcgttggaaaaattatggcgccgccactgagccctggcagccgggtcctgatagccctcattcgggtctatcaacgcctgattagtccgctactcgggccgcattgtcgtttcactccaacctgtagtagctacggaattgaggcattgcgcaggtttggagtgataaaaggcagttggttgacggtgaaacgcgtattaaaatgccaccctttacaccctggtggtgacgatcccgtcccgcccggaccatttgataccagagaacactaacgatggatagccaacgcaatcttttagtcatcgctttgctgttcgtgtctttcatgatctggcaagcctgggagcaggataaaaacccgcaacctcaggcccaacagaccacgcagacaacgaccaccgcagcgggtagcgccgccgaccagggcgtaccggccagtggccaggggaaactgatcagcgttaagaccgacgtgcttgatctgaccatcaacacccgtggtggtgatgttgagcaagctctgctgcctgcttacccgaaagagctgaactctacccagccgttccagctgttggaaactagtccgcagtttatttatcaggcacagagcggtctgaccggtcgtgatggcccggataacccggctaacggcccgcgtccgctgtataacgttgaaaaagacgcttatgtgctggctgaaggtcaaaacgaactgcaggtgccgatgacgtataccgacgcggcaggcaacacgtttaccaaaacgtttgtcctgaaacgtggtgattacgctgtcaacgtcaactacaacgtgcagaacgctggcgagaaaccgctggaaatctccagctttggtcagttgaagcaatccatcactctgccaccgcatctcgataccggaagcagcaacttcgcactgcacaccttccgtggcgcggcgtactccacgcctgacgagaagtatgagaaatacaagttcgataccattgccgataacgaaaacctgaacatctctagcaaaggtggttgggtggcgatgctgcaacagtatttcgcgacggcgtggatcccgcataacgacggtaccaacaacttctataccgctaatctgggtaacggcatcgccgctatcggctataaatctcagccggtactggttcagcctggtcagactggcgcgatgaacagcaccctgtgggttggcccggaaatccaggacaaaatggcagctgttgctccgcacctggatctgaccgttgattacggttggttgtggttcatctctcagccgctgttcaaactgctgaaatggatccatagctttgtgggtaactggggcttctccattatcatcatcacctttatcgttcgtggcatcatgtacccgctgaccaaagcgcagtacacctccatggcgaagatgcgtatgttgcagccgaagattcaggcaatgcgtgagcgtctgggcgatgacaaacagcgtatcagccaggaaatgatggcgctgtacaaagctgagaaggttaacccgctgggcggctgcttcccgctgctgatccagatgccaatcttcctggcgttgtactacatgctgatgggttccgttgaactgcgtcaggcaccgtttgcactgtggatccacgacctgagcgcacaggacccgtactacatcctgccgatcctgatgggcgtaacgatgttcttcattcagaagatgagcccgaccacagtgaccgacccgatgcagcagaagatcatgacctttatgccggtcatcttcaccgtgttcttcctgtggttcccgagtggtctggtgctgtactatatcgtcagcaacctggtaaccattattcagcagcagctgatttaccgtggtctggaaaaacgtggcctgcatagccgcgagaagaaaaaatcctgattcggtgagttttcgctaaaataagggcggtcagttgaccgccttttttcttttcgtagggcggataagcaccgcgcatccgccacacaaagcaacaggaacatcatgagcgataatgacactatcgtagcccaggccacgcctccgggacgtggcggcgttggcatcctgcgcatctccggcttcaaagcccgtgaagttgccgaaaccgtgctgggtaaactgcctaagccgcgctacgccgattatcttccgtttaaagacgccgacggcagcgtgctcgatcaggggattgcgctatggttccctggcccgaacagcttcaccggcgaagatgtgctggaactgcaaggtcatggcggtccggtgatcctcgacctgctgttaaaacgcattctgaccattcccggcctgcggattgctcgccctggtgagttttccgaacgcgcgtttcttaacgataaacttgacttagcccaggccgaggcgattgccgatcttatcgacgccagtagcgaacaggcggcccgtagcgcacttaacagcctgcaaggcgcattctccgcacgggttaatcatctggtagaagccctcacccacttgcgcatttacgtcgaagcggcaattgatttccccgatgaagagatcgatttcctctccgacggaaaaattgaagcccagctcaatgacgttattgccgatcttgatgcagtgcgtgctgaagcacgtcagggtagtttgttgcgcgaagggatgaaagtggtgattgccggacgtcctaacgccggtaaaagcagcctgttaaacgcgctggcggggcgtgaagcggcaatcgtaaccgatatcgccggaactacgcgtgacgtgctgcgtgagcatatccacattgacggaatgccgctgcatatcatcgataccgccgggctacgtgaagccagtgacgaagtagaacgtattggtatcgagcgcgcgtggcaggaaattgaacaggccgaccgcgtgctgtttatggtcgatggcaccacaacagacgccgtggatccggcagagatctggccggaatttattgcccgtctgccagcgaaactgccgatcaccgtggtgcgcaataaagccgatatcaccggcgaaacgctgggaatgagtgaagtgaacggtcacgcgttaattcgtctcagcgcaaggactggtgaaggcgtggacgtgctgcgtaaccatctcaaacagagcatgggctttgacaccaacatggaaggcggcttcctggcgcgtcgtcgccacctacaggcgctggaacaggcagcggaacatctacaacagggcaaagcgcaactgttgggagcctgggcaggtgaactgctggcggaagagttgcgtctggcacagcagaacttaagcgaaatcaccggggaatttactagtgacgacctgctggggcggattttctccagcttctgtattggtaagtaaccgcgcttacgaggccgcattctgactgtcagatgcggcttcgcttcattgttaccactcctgttattcctcaaccctttttttaaacattaaaattcttacgtaatttataatctttaaaaaaagcatttaatattgctccccgaacgattgtgattcgattcacatttaaacaatttcagaatagacaaaaactctgagtgtaataatgtagcctcgtgtcttgcgaggataagtgcattatgaatatcttacatatatgtgtgaccagtaaatggttcaatattgacaacaaaattgtcgatcaccgcccttgatttgcccttctgtagccatcaccagagccaaaccgattagattcaatgtgatctatttgtttgctatatcttaattttgccttttgcaaaggtcatctctcgtttatttacttgttttagtaaatgatggtgcttgcatatatatctggcgaattaatcggtatagcagatgtaatattcacagggatcactgtaattaaaataaatgaaggattatgtaatggaaaactttaaacatctccctgaaccgttccgcattcgtgttattgagccagtaaaacgtaccactcgcgcttatcgtgaagaggcaattattaaatccggtatgaacccgttcctgctggatagcgaagatgtttttatcgatttactgaccgacagcggcaccggggcggtgacgcagagcatgcaggctgcgatgatgcgcggcgacgaagcctacagcggcagtcgtagctactatgcgttagccgagagtgtgaaaaatatctttggttatcaatacaccattccgactcaccagggccgtggcgcagagcaaatctatattccggtactgattaaaaaacgcgagcaggaaaaaggcctggatcgcagcaaaatggtggcgttctctaactatttctttgataccacgcagggccatagccagatcaacggctgtaccgtgcgtaacgtctatatcaaagaagccttcgatacgggcgtgcgttacgactttaaaggcaactttgaccttgagggattagaacgcggtattgaagaagttggtccgaataacgtgccgtatatcgttgcaaccatcaccagtaactctgcaggtggtcagccggttagtctggcaaacttaaaagcgatgtacagcatcgcgaagaaatacgatattccggtggtaatggactccgcgcgctttgctgaaaacgcctatttcatcaagcagcgtgaagcagaatacaaagactggaccatcgagcagatcacccgcgaaacctacaaatatgccgatatgctggcgatgtccgccaagaaagatgcgatggtgccgatgggcggcctgctgtgcatgaaagacgacagcttctttgatgtgtacaccgagtgcagaaccctttgcgtggtgcaggaaggcttcccgacatatggcggcctggaaggcggcgcgatggagcgtctggcggtaggtctgtatgacggcatgaatctcgactggctggcttatcgtatcgcgcaggtacagtatctggtcgatggtctggaagagattggcgttgtctgccagcaggcgggcggtcacgcggcattcgttgatgccggtaaactgttgccgcatatcccggcagaccagttcccggcacaggcgctggcctgcgagctgtataaagtcgccggtatccgtgcggtagaaattggctctttcctgttaggccgcgatccgaaaaccggtaaacaactgccatgcccggctgaactgctgcgtttaaccattccgcgcgcaacatatactcaaacacatatggacttcattattgaagcctttaaacatgtgaaagagaacgcggcgaatattaaaggattaacctttacgtacgaaccgaaagtattgcgtcacttcaccgcaaaacttaaagaagtttaattaatactacagagtggctataaggatgttagccactctcttaccctacatcctcaataacaaaaatagccttcctctaaaggtggcatcatgactgatcaagctgaaaaaaagcactctgcattttggggtgttatggttatagcaggtacagtaattggtggaggtatgtttgctttacctgttgatcttgccggtgcctggtttttctggggtgcctttatccttatcattgcctggtttagtatgcttcattccgggttattgttattagaagcaaatttaaattatcccgtcggctccagttttaacaccatcaccaaagatttaatcggtaacacctggaacattatcagcggtattaccgttgccttcgttctctatatcctcacttatgcctatatctctgctaatggtgcgatcattagtgaaacgataagtatgaatttgggttatcacgctaatccacgtattgtcgggatctgcacagccattttcgttgccagcgtattgtggttaagtagcttagccgccagtcgtattaccagtttgttcctcgggctgaagattatctcctttgtgatcgtgtttggttcttttttcttccaggtcgattactccattctgcgcgacgccaccagctccactgcgggaacgtcttacttcccgtatatctttatggctttgccggtgtgtctggcgagttttggtttccacggcaatattcccagcctgattatttgctatggaaaacgcaaagataagttaatcaaaagcgtggtatttggtagcctgctggcgctggtgatttatctcttctggctctattgcaccatggggaatattccgcgagaaagctttaaggcgattatctccagtggcggcaacgttgatagcctggtgaaaagcttcctcggcaccaaacagcacggcattatcgagttttgcctgctggtgttctctaacttagctgttgccagtagcttctttggtgtcacgctggggttgttcgattatctggcggacctgtttaagattgataactcccacggcgggcgtttcaaaaccgtgctgttaaccttcctgccacctgcgttgttgtatctgatcttcccgaacggctttatttacgggatcggcggtgccgggctgtgcgccaccatctgggcggtcattattcccgcagtgcttgcaatcaaagctcgcaagaagtttcccaatcagatgttcacggtctggggcggcaatcttattccggcgattgtcattctctttggtataaccgtgattttgtgctggttcggcaacgtctttaacgtgttacctaaatttggctaaatccttcaagaagccagccattcgctggcttcttgcctctcaggaaatcacttatgtccaaatggcaactcgcctgatcctccttcaccacgtatgctttgcgtcaccttactatcaggacgctttagcccatgtcccgctttttgatttgtagttttgccctggttttactttatcccgccgggattgatatgtacctcgttggtttaccgcgcatcgccgccgatctcaatgccagcgaagcgcagttgcatattgcgttctccgtatatctggcggggatggcagctgcgatgttatttgccggtaaagtggccgatcgtagtgggagaaagccggtcgccatacccggcgcggcgctatttattattgccagcgtgttctgtagtctggctgaaaccagcacgttatttcttgcaggccgatttctacaggggttgggcgcaggctgttgttacgtagtggcgttcgctattttgcgcgacacgctggatgatcgacgtcgggctaaagtgctgagtttactcaacggtattacctgcatcattccggtgttagcgccagtgctcggacatctgattatgcttaaattcccgtggcagagtctgttctgggcgatggcaatgatgggcatcgcggtactgatgttgtctttgtttattttaaaagaaacgcgcccagcggcccccgcagctagcgataaaccacgagaaaatagcgagagcctgcttaaccgttttttcctcagccgtgttgttatcaccaccctcagcgttagcgtgatcctcactttcgtcaacacgagtccggtattgctgatggaaatcatggggtttgagcgcggtgaatacgccaccattatggcgctgaccgctggcgtcagcatgaccgttagtttctccacgccatttgcgctgggaatttttaagccacgtacgttgatgatcaccagccaggtgttattcctggcggcggggatcactcttgccgttagtccttcccatgcggtttctctgtttggtatcacgctgatttgcgccggtttcagcgtaggttttggtgtggcgatgagtcaggcgttagggccgtttagtttacgcgcgggcgtagccagcagcaccttaggtattgcgcaggtttgcggtagcagtctgtggatttggctggcagcggtggttggtatcggcgcatggaatatgctgatcgggattctgattgcctgtagcatagtgagcctgttgctgattatgttcgtcgcgcctggacgccccgttgccgctcatgaagaaatccatcaccacgcttgatctcaatctgctgctttgtctgcaactgctgatgcaggagcgcagcgtaaccaaagcggcgaagcggataaacgtgacacctagcgcggtgagtaagagcctggcaaagttaagagcgtggtttgacgacccgctctttgtgaacagtccgctgggtctgagccccacaccgctgatggtcagcatggagcaaaatctggcggagtggatgcaaatgagcaacctgctgctggataaaccgcaccaccagacaccgcgcggcctgaagtttgagctggcggcggaaagtccgctgatgatgatcatgcttaatgcgctgagcaaacagatctaccaacgttacccgcaggcgaccatcaaattacgtaactgggattacgattccttagatgccattactcgtggtgaagtggatatcggtttttccggtcgcgaaagccatcctcgcagccgggagctgttaagcagcctaccgttagccattgattatgaagtgctgtttagtgatgtgccctgcgtctggttacgcaaagatcatccggcactgcatcaaacgtggaatctggacaccttcttacgttatccgcatatcagcatttgctgggaacagagcgatacctgggcgctggacaatgtgttacaggagctgggacgcgaacgcacgattgctatgagcctgccggaattcgagcagagtctgtttatggcagcgcaacccgacaatctgctactggcgaccgcgccgcgctactgtcagtactacaatcaactccatcaactgccgttggttgctcttcctctcccgtttgacgaaagccagcaaaaaaagctggaagttccttttaccctgctgtggcataaacggaacagccataatccgaagatcgtctggttacgggaaaccattaaaaacctttacgcgagcatggcataaccgaatcgtatgaaacgcgacccaatttcacaataaaatgtaaaaaagttgtaataagcttgtctgaatcgaacttttagccgctttagtctgtccatcattccagtaaatgattactcttgtattcataatggaccattaagcatggagcgaaaaatggcgactcactttgcccgagggattttaacggaaggacatctgatttctgttcgtctcccctcccagtgtcatcaagaagcccgaaacattccccctcatcgtcaaagccgttttctggcgtccagaggtttactcgcagaactgatgttcatgctgtatggcattggcgaattgccggaaatcgtcaccctgccgaaaggtaaaccggttttcagtgataaaaatttgcctagcttttccatttcctatgccgggaatatggttggcgtggcgttaacaaccgaaggtgaatgtggcctcgatatggaactacagcgtgcgacgcgcgggtttcatagcccacacgcgcccgataaccacacctttcccagcaatgaaagcctatggatcagtaaacaaaacgatcctaacgaagcgcgggcgcagctcatcacgctgcgccgaagcgtgctaaaactaaccggtgatgttttgaatgacgatccgcgcgatctgcagctgctgcccattgccggacgcctgaaatgtgctcatgtaaatcatgtagaagcgttatgcgacgcggaagacgtgctggtgtggtccgtggcggtcacgcccacgattgaaaagctcagtgtctgggagttagatggcaaacacggctggaaaagcctgccggatattcacagccgcgccaacaatcctaccagccggatgatgcgttttgcccaactctctaccgtgaaggcttttagcccaaattgatagacaaccacaggagtcatcatgtctgaaaaattgcaggtggttacgttactggggagcctgcgcaaaggcagttttaatggcatggttgcacgtaccctgccgaaaattgctccggcgagcatggaagtcaatgcgttaccatccattgccgacattcccttgtatgacgctgacgtacagcaggaagaaggttttccagcaacggttgaagctctggcggaacagatccgtcaggctgacggtgtggtgatcgtcacgccggaatataactacagcgtaccgggtgggctgaaaaatgccatcgactggctttcccgcctgccggatcaaccgctggccggtaaaccggtattgattcagaccagcagtatgggcgtgattggcggcgcgcgctgtcagtatcacctgcgccagattctggttttcctcgatgcaatggtgatgaacaagccggaatttatgggcggcgtgattcagaacaaagttgatccgcaaaccggagaagtgattgatcagggtacgctggaccacctgaccgggcaattgaccgcatttggtgagtttattcagcgagttaagatctaaataaaaaacccgccagcaatcatgcatggcgggtttttaacgcgctatcgattttagtgagcgtcgataaagacaatcttcaggataaacagcagcgcaacgatgattacgcacgggcttagatcacgcagacgtccggtaccgattttcatcacgcagtaggagataaagcccagcgcgataccttcggtaatgctgaagctgaacggcatcatcacggcggtaataaacgccggaacagattcagtaagatcctgccagttcacgcgtgccagactggaagtcatcagcacgccaacgtaaatcagcgcaccagctgcagcgtagcctggcaccatccccgccagcgggctcagaaagataaccagcaggaacagcagaccaacaaccactgccgtcagaccggtacgaccgccaacgcttacgccggaagaggactcaatataagccgtaacggaagaagtaccgataaagctaccggtcacggaagagatactgtcgacatacagcgcctgcttcatgcgcgggaatttccccttctcatccgccagacctgctttatcggtcacgccaatcagcgtaccggaggagtcaaacaagttgaccaacatgaaagagaaaatcacccctgccagcccgaggttaaagctcccggctaaatctacatgacccacaactgtcattacgctcggcggcgcagaaacgatgccattgtagtgcacatcacccagcatccagcccagcagcgtcgtcaccacgatagaaaccagcaccgctgcgtgaatgttgcggctggccagaatagcaatgatgaagaagccgaggatacccagaagtacgctgtgagaagtcagattaccgatgctcaccagcgtttccgggttagcgacaatcacacctgcgtttttcagccccatcatgccaatgaacagaccgataccgctggtaatacccacacgcagactcaccggaatgttggctatcatccagtagcgaacgcggaaaatcgtcagtaacagcagacctatcgcgccccagaagattgcgcccatcccgacctgccacggcaagcccatcgcctgtacaacgacaaaagcgaagaacgcattcaggcccatagcgggtgccagtgcaactggcaggttagcaaacagtcccatcataatactgccgaatgcagcgatcagacaggtagtgacgaagacggcgctggtatccatgccagcaacgccaagaatttgcgggttaacaaaaacgatgtaaaccatcgtcaggaaggtggtaaaaccggcgatcacttcggtccgtgccgtcgtgccatgttcgcgcagtttaaacacgcgttccagcatcccctgaccagaagtctgggtggtatgttgatgactcattatctatttccgaacaaggagggaaaatccgtcgctatcgtataccaaaatgcgacaataggcgcgtttgtgagagacttttttattggatttacttatacggcaacgattgcgttgcgcaaatcggctctacgaaaacgttaaactgattaaaaaggaaaggcatgtcccggatagaagcggtatttttcgactgcgacggtacgctggtcgacagtgaagtcatttgctctcgcgcatatgtaacgatgtttcaggaatttggtattacgctcgatcctgaagaggtattcaaacgtttcaaaggtgtaaaactgtacgaaattatcgatattgtttcccttgaacatggtgttacgttagcgaaaacagaagctgaacacgtttaccgtgcagaagtcgctcggctgttcgatagtgaactggaagccatcgaaggggctggagcgctcctgagtgcgatcactgcgccaatgtgtgtggtatctaacggcccaaataacaaaatgcagcattctatgggcaagctgaatatgttgcactacttcccggataaactgttcagcggctacgatattcagcgctggaagccagacccggcgttaatgttccatgcggcaaaagcgatgaatgtaaatgtagaaaactgcattctggttgatgacagtgttgccggtgcacaatctggtatcgacgcaggtatggaagtgttctacttctgcgccgacccgcacaataagccgatcgttcacccgaaagtcaccacctttacccatcttagccagttacctgaactgtggaaagcgcgtggttgggatattacggcataattcttcacactcccttcacttaccccgcttaaattggcgctcaaaggtaagtaaagggagtttgatatgtctgttagtcgtcgggtaatacatcacggactttattttgcagttttaggaccgttaattggtgttctgtttcttgtcctctacatattcttcgcaaaagaaccgctggttctttgggtgataatacatccaatttttctcttattgagcataactacgggagctattcctgcgttgttaaccggtgtaatggttgcctgtctgccggaaaagatcgggagtcagaaacgttatcgttgtctggctggtggcataggtggcgtcgttatcaccgagatctattgtgcagttattgtacatattaagggcatggcttccagcgagttgtttgaaaacattctttctggtgacagtctcgttgtccgcatcattcctgcattgctggcaggtgtggtgatgagcagaatcattacccgtctacccggattggatattagttgtcctgaaacagactctttaagttaagcgggatactttatctttgggctactcaaaagcagacaggatgtttctatgactcaaaatatcaggccgttaccccaattcaaatatcatcccaagccactggaaacaggcgcatttgaacaggataaaaccgtagagtgcgattgctgtgaacaacagacgagtgtttattacagcggtcccttttattgcgttgatgaagttgaacatctctgtccgtggtgtattgcggacggttctgctgctgaaaagtttgcaggtagttttcaggatgatgccagcatagaaggtgttgaatttgagtatgatgaagaggacgaatttgccggtattaagaacacatatcctgatgaaatgctgaaagagttggttgaacgcacgccaggttatcatggatggcagcaggaattctggctcgcgcattgtggcgatttctgtgtttttatcggctatgtgggctggaatgatataaaagatcgcctcgatgaatttgccaaccttgaagaagattgtgagaatttcggtattagaaattctgatctagctaaatgcctgcaaaagggtggtcattgtcagggttatctcttccgctgtctccactgcggcaagctgagactgtggggtgattttagctaattatttaaataatgagaacaggccggagcgtaattcacacatccggccttatttcttaagcttaaccgagtgctaattctgcggcagcggctttatcagcgattaccatcaggctaggatgcagctgcaacacggaagctggaacatcttcggtaaccggaccttgcagaacatttttcagtgcctgcgctttacccgcgccgctgacaattatcagcaagtttttcgccgccatgatgcttttcggccccatcgtcacgtagctgtcaggcactaagctaaagtcgccgcccaactcgccatgcgccacaatatcaaccatctctccctggatcgggaactccacggtttgctcatggaaatgggtcgtattcggcaaattgccacaaaaatgaccatctgcacctaatcccagcaccaccaaatccagtccgccttcacgcgccagtttctgatcatgctcgcggtagttatcaatagtgagcttctggatattctcttctttgatccccgcaggggtgaaaaacagattacgcagattggtaatcgttacgccttctccctctttgccgcgaaatggaatttcatcaaaattatagaaatagcagttatcgtaccagggcttacctttaaccagggtggtgaggtattcatacatgcctttgggcgtgctaccggcggtaattgccaggttaacacgacgcgtcttgctcatataaccaagcagatggtgtgccgcgacacggctcatttcctggtaatcttcggtaatgattaatttcatcttaatgccttattttatttaaataatttctgtacaaaggctgcataggctggtcgccagacatccatttcatggttcagacccggatattcctggtaatcaaagttaatttttttctgctcaagctcagttttcagcccggcgatatccttgccggttacgacatctttatcccccacaaccacagtaaaattacgtagttgctggttgatagctgccggatcgttcagtcgggccgcgacaccttcatccggtacggttgtcgtggtaacaccactgaatgtggccagccagccaaagctttccagatgattcattccggaaaccagcgcctggtacccgccttgactaagccctgccagcgcgcggccatcggcatctttacggacattaaaacgcttgctaatcagcgggataatatcgttcatcagttcgcgatctgccgctttagcattcagcggataaaagactttacgtctttcctgaggcacgaaatcttcgggaataatgcccttcgcatcggtttctgtatccgggatcaccaccagcatcggtttaattttcccttcagcaagcaggttatccatgatttgcgggatacgcccctgatcgatagcggaacgtccggtatcaccaaagccgtgatagaaatagagcactggcaaaggctcgcccatgccggtgtatcctggcggggtccagacatacatctgacgttcagattgcaatgcgttggagtggtaagttatggcgatcaaatcaccatgcgcaacagaacgcgtatccagataactgcctggcaccagaatcatactggagttaacctggcgctgaggattagtcattgcggtgcctgtatcaatgctgcgtacaccatcaacattgaaaaaatactcgtacaggttgcctttcaggataggtgtgcgccagctccagactcctgcttcgtctttggtcatcgggtgaatattgtccggaaccggaacacccaccactacagagacattttttgccccaggggcaaagtagcgaaaggtcacgctgttatcggcattgacctgagtcacatactgtttcaccgggatagtgggtgccgggctggctggcatatccgctgctatggcccactgagcagaaataccgctggcaatagccagcgttaaagcagcaatttttatattcatcgtaatattcctttcattaagttccattaccaccagatttcagcctgggcaccgacagcaaactggtcgtctttattgtcttcaaaggtgaagccatccagttcgttttccagggctttgatatacgtggcgtagaaacgaatttccggacggctggtcaacatactggtattgactttaaaggtatggaagagcgtggttttataaccagactcattaaatttattactattcgcatctttgttttgctgggtgaaatagcccagttcaacacctgtctggttatattggtcccaaatataggccgggcgaacaaccgcacgaatagattcgaaatcagagtgggcgcctgtttcgtagctatatatatcgttaccgaaggagtaaacaatcgcgttagctacaatgaaatgatcgccaatataggcttcgccctggctagtcagacgtaccgctgttccgccggtgtgatcaccataataacgaccattaaaggtggtaaatggacttgcgccagcataacggccaaagttactggcgatagagttattcgcgaccaggaaggagaattcgttgaagccacctttatcaaatttctgcgttaaagatgtgccaaacatccaggtatctttccagtcataatacccgttattatcctgattatctttttcgcttgcgctttcgtttgccgtgacataacgaccacttaccattaaggtggctttatcccataacgggatatctttatagcgtaaatcaatggtattggtattaatctgctgtttgttttgcaggctgcgatcgtaatcatcgacatcttcgcgaaccagcgcgatatcaattttacccggaccgactttccagttttccagacctacacccgctgcggcatcagtacgctgcgttttccagtcaagcatctggatttcaattttcggcgcaccgtgtttacccacccagaaatcagcctctggcgcaaagggcaggaaacctttggtggtaacgtacatatcggagaactgcatatagttctcgccaccggcgttatcgccaaaccagccggtagagtactgctgaccaacgttaccatccatcatcacaacggcatcaacccgtttgccgttttcgttgtagacacgttgttttaactgcaaatcaaaccagccggagtattcgttaccaaagcggcccagagaaccaatcgcccaacttttaggactaccatgagaggcggtcccccaaccagaacggtaatagccgttgtaactaaagccaatttcatctttcacaaatttactgaaatctttcagagtcatggaagaataaatgctgcctgtctcactggcatttttctcttcatttttgaccagtacagcatcaggttttgcggcactactggtcgggaacggattggcggcatacccttgatcattcgtacttacgctacgattcaccgtcgctggcgtatactttttcttctcttcatctttatactttttgagttcgctttgcgtttctcttaacgccttttctaataactcaaggcgttgttccaccgttaaactttcagccaaactttgtgcagaaaaggctaacggtgccattaataagatggcagaggtaataagatttcgtctaaacataatatccctttatggtgcaaagaaagaattaacgcatcgcatccagactgttctgaatgcgacgataattaaggtgctttaatggttattttttttaaactcagcccccgcgtcttgatcacctctgcataccatccgaagcttttcttgcgtgttcttgtgaggcttccttcgccattatcatcacgatccacataaataaagccgtagcgcttagacatttgactatgagatgcactgactaaatcaattggcccccaactggtgtaccccataatatccacaccatcggcaatcgcttcatttacctgtaccaggtgatcgtttaaataggcaattcgataatcgtcctgtatgctaccatccgcttcaacgctgtcttttgcgcctaatccgttctcgacaataaataacggtttttgataacgatcccaaagcgtatttaacagaacccgtaatccaaccggatcaatttgccacccccactcactacttttcagatgcggattggggatcatattcagtatgttgccctgcgcatttttattaatgctttcgtcgtgggaaacacaaccagtcatgtaataactaaaagagatgaaatcgacggtatgttttaaatcttctgcgtcactttcagtcatctcaatggtgatattgtggtcgcggaagaaacgctgcatatagccgggatactggccacgcgcctgaacatcaccaaagaacatccagcgccggttctcttccatggcctgcaacatatcctgtggctggcaggtgagggggtaaaccagcccaccgagaagcatattgccgattttcgcttcggggagcaggctatgacaggctttaactgcccgcgcactggcaaccagttgatggtggatagcctgataaacttccgcctcgccactctcttctgccagccccacgcccgtgaatggcgcgtgtaagctcatgttgatttcattaaacgtcagccataacgccactttatgttggtagcgagtaaagaccgtgcgggcgtaatgctcgaagtgatcgatgaccgctcgattagcccaaccgccgtagtttttcaccagcccatatggcatttcgtaatgggataacgttaccagcggcttgatccccgcctgcgccatttcatcaaacagccgatcgtaaaacgctaaccccgcttcattcggttcgacttcgtcgccctgagggaaaattcgcgcccaggcaatggaaatacgcagacaggtgaagcccatctcggcaaataacgcgatatcttccgggtaacggtgataaaaatcgatggcgacatctttgatattctctttccccaggatgcgcggttccatttttcccattacgccatgaggctgtaaatcactggtgctgatccctttgccatcttcctgccaggcaccttccacctgattggcagctgttgcgccaccccaaagaaatgtttctggaaatgctttcataattaactccttttatcgttagcgaatgatggataacagcggttcacctgcgcttatctgcgccgtgccgtggggtaatacgtccgtaaaatcatcgctattactgattaataccggcgtcgtcagatcaaatccggcctcgcgaatagcagggatatcaaaagaaatcagccgatcgcctgtattgaccttgtcacccacgttgacgtgagcggaaaagaatttgccgtccagttttacggtgtcgataccgacatgaatcaggatctccacaccatcatcactctcaatgccaatggcgtgtaatgtggcgaacaagctagcaattcgacccgcaaccggagaacgcacttcaccaacgctgggcagaatggcaatacctttacccaacaggccactggcaaacgtggtatcagcgacgtgaatgagcggcacaatctctcccgtcatcggactacagataccgccctgctcaggtggtgtaataacctctggtgttttctcttgcggggcaccctgcgctggctgacgtttagcggtgatgaaatgaagcatcaccgtaccgacaaatgcgcaaccgatggcaatgacaccgccaataacgctggcccagacggtgaaatcaattcccgtactcgggatggtttgcatgaaggtgaaaatacttggcaaaccaaaggagtagactttcgtttgcgcgtagccaataatggtggccccccaaagccccactgatacaggcgataacaaaggggtacttacgcggcaggttgacgccatataccgctggttcggtgataccaaacagactcgtcaacgccgcacttcccgccaccacttttttctgcgcatcgcgttcgcagaggaagacgccgagcgccgccccgacctgcgccataatggcgggcattaacagcgggatcatggtgtcgtagcccagcacggtgaagttattgatacacagcggcaccaggccccagtgcagtccgaacatgacgaagatttgccagaagccgcccattaccgcgcccgcaaatgcaggaaccgcctgataaagccagagataaccggcggcaatcagttcgcttatccaggtacttagcggccccaccagcagaaaggtgacgggtgtgataaccatcagacatagcaatggtgtgaagaaatttttgattgcgctcggtaaccacgcattaagtcggcgttccagaatgctgcacaaccaggcagaaaaaataatgggaataacgctactgctgtaattcaacaatgtgaccggaatacccaggaaatccagccccagcgcatccgctttttgcccgttctcgaaagcagtcagaattaatggatgcactaacgctccaccaatcaccatggcagtaaatggattaccgccgaagcgtttccccgcggtgtatcccaggattatcgggaagaaccaaaacaaggcatcactggcgctgaataaaattaaataagtaccactttgttcggtcgtccactgaaaagtgagcgccagagccagcatacctttcaagatcccggttgccgccatcaaaccgatcagaggcgtaaaaataccactaataacataaacaaagcggtttagcagattacctttatcatcattttccggtgcctgttgcgctttttcgtcaaggcctgccacactgttaaccgccaggaagacatcggccacatggttacctatgaccacctgaaactggccaccgctttccaccaccataataataccgggggtctttttcagtacctctgcttgcgctttgctttcatcctttaatttaaaacgtaatcgcgttgcgcaatgcatcagactcacaatgttatctgcgcccccgactcctgcgactatttttctggctaactccgtcataacttgccctctaccgctttgcggcaaaactccaaaaaaaaacctgaaaaaaacggcctgacgtgaatcaagcaatttttttcaggttttgcccgcttagtgcggtaacaatcctttactcagtaataatatttcagtgttctttgcgcacgcgctctatatttatggctaaaaacataatctctgcgggactaattttacgttgatactgcaaaccaataaaaatggcgatccgttccgcacattgccatgcttgcgggtaattttgttttactgcttgttgtaaactttcatcactatcgttaatactagcatgttcaagaatacgccaggataaaaacttcagatgtgtaaccagtcgctgataactcaagctttcttcctggtaattaaggctgaactgaaattttattaattgcagcatttcgcgcattaactgcgtgacacctgcaacatcctccatatttccgctcatttgggcactgaccagatgcatggcaataaagcccacttcatctttcggtaactgcacgcccaaccgtttatcaataatggttaacgcttcttcccctagctggaactctttcgggtaaagccgctggatatcccacagcaacgggttgggcagcaacacgttttgctgaaagcgtttaatcgcaaactggcaatggtcagttaggctgatataaatactgtcctgtaattttcccaagcgctcctgcgctaaagagataatacgatcacaggttgccatcacctcaagaggaatatgacttaagagttcgcttaatcgcccgttcagttcatgactgctcaaggcatactctttttctattccactactgttaattctttcgccagcgcgtttttgaaagccaattccgcgccccatgacgactttttcccgctgttgatcatcaataaccaccacaacattattgttgagaattttggtgatttgcatgttcatagcaaggaccttttttataaacaaaaaaacccgacttcaccagtattctctggttatgtcaggttttgcctgcgaatgcagtaacaatccagtcatttattaatggtttttataacgaacatccaggttcggaaattaatttaattgcgtgcagagaaaatagcaatgcgctattgataaaaatatgaccatgctcgcagttattaactttgtgtaattttaggaatttataaagttatatataacaaatcccaataattaagttattgggatttgtctggtgaattatttgtcgctatctttccccgccagcagtttatccagctcatcgccaccgacgtgacggaaatcctgccccttcacgtagtagaagataaactcacaaatattctggcagcggtcgccaatacgttcgatagaacgcgcgcagaacagcgcagtaagtacgctcggaatggtacggctatcttccatcatgtaggtcatcagttgacgaacaataccttcgtattcctgatcgacttttttatcttcacgataaatacgtaccgcttcgtcaatgtccatccgcgcgaacgcgtccagcacgtcgtgcagcatctggatggtatgacggcccaggctctccagacttaccagcaacggctgatgctgctgggagaatttctccagcgcagtacggcagattttgtccgccacgtcgccaatacgctccagctcggcaatggttttactgatcaccataaccagtcgcaggtcgctcgccgtcggctgacgtttggcgataatgcgcacgcaggcttcatcgatcgccacttccatcatgttgacgttcttgtcgccttcgatgacgcgcttcgccagatcgctgtcctggttatgcatcgcggtgattgcatcagaaagctgctgctccaccatgccgcccatggtcatcacctgcgtgcggatactttccagttcggcgttgaactggccggaaatatgtttattaagattgagactgtccataacgcactcctgaatcaaccgtaacgaccggtgatgtagtcttctgtttgtttcttcgctggcttggtgaacagatcgtccgtgttgctgaactcaatcaattcgcccaggtacataaacgccgtgtggtcggaacaacgcgcagcctgctgcatgttgtgggtgacgatcaccacggtgtaatcctgcttcagttcggtgatcagctcttcaatacgcccggtagagatagggtcgagcgcgctacacggttcgtcgagcagcagcacttccgggcgaatggcgataccacgcgcaatacacagacgctgttgctgaccaccagagagagagtaaccgctctggtgcaatttatctttggtttcgttccacaatgcggctttggtcaatgcccactgcacgcgctcgtccatgtcggcacgggagagcttctcaaacagacgaacgccaaaagcgatgttgtcgtagatggacatcggaaacggcgtcggtttctggaacaccatgcccactttcgcacgcagcagtgcgatatcctgagagttggtcaggatgttgtcgccatcaagcagaatttcaccttccgcacgctgctccgggtacagttcaaacattttgttgaaggtacgcagcagcgtgcttttaccgcagccggacggcccgataaacgccgttacctggtttttagcgatatccaggttgatgtttttcagggcatggaatttgccgtagtagaagttcaaattacgaacctgaattttactcggggcagtttcaaccatactcattgcaatcttttcctcatcgtgcctgatgcacttcgctaatcaggcttaccgtaggccggatcaggcgttcacgccgcatccggcaaagtgttaaccgtgtacagagtcaaaaaggcgctcggtcggtcccctcgcccctctggggagagggttagggtgaggggaaaaccgtgtcagcaatatcaaccgtgtttattcttcgcaaaaacaacgcgcgccagaatgttcagcagcagtacgcacagggtaatgatcaataccccggcccaggccaattgctgccattccgcaaacgggctcatcgcaaacttaaagatcgtcaccggcaggttggcgatcggctgcatcatgtccgtgctccagaactggttggagagcgcggtaaacagcagcggcgcggtttcaccagcaatacgggcaatcgccagcaggataccggtcataatcccggacacgctcgctttcagcgtaatcgcagagatcatcttccacttcggtgtacccagcgcataagccgcttcacgcaggctgtacggcaccagtttcagcatgttctcggtggtgcggataacaatcggcacctgcaacaacgccagggcaatcacgcccgcccagccggagaagtgctccatctgcgccaccacaatggtgtaaacaaacagaccaaccacaatgctcggcgcagagagcagaatgtcgttaatgaagcgaatcacttctgccagccaggatttacgaccatattccgccagataaatccccgccataatgcccagcggcgtaccgaataccgtggcccacaaaattaacagcccgctacccgccagagcgttcgccagaccaccaccttccgtattgggcggcggcgtcatttcagtgaacagcgccaggctcataccgtcgataccgcgagtgatggtggacattaaaatccagatcagccagaacaggccgaaggccatcgtcgccatgctgagcgtcagcgcaatacggtttttgaggcggcgacgcgcctgcattttgcggcgagattcagccagcgccgcagtggtttgcatttcaaccatagccattagcgtgccccctcattcttagccaggcgcataatcataaacttgcttgcggcgaggacgatgaaggtaatcacaaacaggatcaggcccagttccatcagtgcggcaacgtgcagaccggattccgcttccgcaaattcgttcgccagcgcagaggtgatactgttgcccggcatatacaggctggcgctgtcgagctggtaggtgttaccgatgataaaggtcaccgccatggtttcaccgagcgcgcggcccagccccagcatgatgccgccgataacaccatttttggtgaacggaagaacgatacgccagataacttcccaggtggtgcagccaataccgtaggcgctctctttcatcatcaccggggtttgttcgaacacatcacgcattaccgccgcaatgtacggaataatcatgatggcgaggatcacgcctgccgcgaggataccgataccaaatgcggggccagagaacagcgcgccaacaatcgggatattgctcatgatattgccgaccggctcctgaaagtaaacggcgaacagcggcgcaaagataaacaggccccacatgccgtaaacgatacttggaatggctgccagcagctcaatggcgatacccagcgggcgtttcagccagccaggcgcaagctcagtcaggaacagggcgataccgaaactcaccgggacggcgatcagcagcgcgataaagctagtcaccaacgtaccgtagatcggcaccagcgccccgtagatatcgttcggtgcatcccactctttggtccataggaaagccagaccaaatttctgaatgctcggccaggaggagatgatcagagagacaataatgccacccaacatcaatagcacaatcagcgccgccagttttaccagcacgctgaaaattatgtcgccctttttacccggtgggttaaaagcaggcttggttgcagccataagttactcttcagttaaacgcgtttacaaagtcattttgtaatgccggatgcggcgtaaaacaccgtacccggcctggagttttattagtacagcggcttaccgctactgtctttaatattggtcttccacgcagcgcgaacctgttcaactacactatccggcaggctggcgtaatccaggtcgttcgcctgtttagccccggttttgtacgcccagtcgaagaatttcagcacttctgtgccttgttctggtttcttctgatctttgtggatcagaatgaacgtggtagaggtaataggccatgcatcttcgcctttctggttggtcagatcctgagcgaaggttttgctccagtctgcaccttttgctgcattagcgaagttttcttcggtcggactaaccggtttaccatcagcggagatcagtttggtgtacgccaggttgttctgcttcgcgtaagcatattcaacataaccaattgcacccggcagacgctgaacgaacgcggcgataccgtcgttacctttaccgcccagaccgatcggccattttacggtagagccagtaccaacgttgtttttccactcttcgttcactttcgccaggtagctggtgaagacgaaggaagtcccggagccatctgcgcggcgtactacagcaatgttttgactaggcagtttcagacccggattcagtttggcgatggcttcatcatcccacttcttgattttgcccaggtagatgtcgccgagggttttaccatccagcaccagttcgccagacttcagccctggaatgttaaccgccagcaccacgccgccaatcacggtcgggaactggaacagaccttcctgagccagtttttcgtcagacagcggcgcgtcagaggcaccaaaatcaacggtattagcgataatctgttttacgccaccggaagaaccgataccctggtagttaactttattaccggtttctttctggtaagtgtcagcccatttggcatacaccggcgcagggaaggttgcacctgcacctgtcaggcttgcttctgcaaacacagagaaagcactcatgcttaaggtcgcggcgacaacagttgcgacggtggtacgcataactttcataatgtctcctgggaggattcataaagcattgtttgttggctacgagaagcaaaataggacaaacaggtgacagttatatgtaaggaatatgacagttttatgacagagagataaagtcttcagtctgatttaaataagcgttgatattcagtcaattacaaacattaataacgaagagatgacagaaaaattttcattctgtgacagagaaaaagtagccgaagatgacggtttgtcacatggagttggcaggatgtttgattaaaaacataacaggaagaaaaatgccccgcttacgcagggcatccatttattactcaaccgtaacgctttttgccaggttacgcggctggtcaacgtcggtgcctttgatcagcgcgacatggtaagccagcagctgcagcggaacggtgtagaagatcggtgcaatcacctcttccacatgcggcatctcgatgatgtgcatgttatcgctacttacaaaacccgcatcctgatcggcgaagacatacaactgaccgccacgcgcgcgaacttcttcaatgttggatttcagtttttccagcaattcgttgttcggtgcaacaacaataaccggcatatcggcatcaattagcgccagcggaccgtgtttcagttcgccagcagcgtaggcttcagcgtgaatgtaagagatctctttcaacttcaatgcgccttccagcgcgattgggtactgatcgccacggcccaggaacagcgcgtgatgtttgtcagagaaatcttctgccagcgcttcaatgcgtttgtcctgagacagcatctgctcaatacggctcggcagcgcctgcagaccatgcacgatgtcatgttcaatggaggcatccagacctttcaggcgagacagcttcgccaccagcatcaacagcacagttaactgagtggtgaatgctttagtggatgccacgccgatttctgtacccgcgttggtcattagcgccagatcggattcgcgcaccagagaagaacccggaacgttacagattgccagactaccaaggtaacccagctctttgctcagacgcaggccagccagggtatccgcggtttcgccagactgactcaaggtgatcatcaggctgttacgacgcacggcagatttgcgatagcggaattcagaggcgatttcgacgtcgcacggaatacctgctaggctttcaaaccagtagcgggaaaccataccggagttataagaagtaccacaggcgaggatctgaatatgctcaaccttgctcagcagttcgtcggcgttcggtcccagctcgcttaaatcaacctgaccgtggctgatgcgtccggtaagggtgtttttgatcgcgttcggctgttcgtagatctctttctgcatgtagtgacggtaaatgcctttatcgcccgcgtcatattgcagattggattcgatatcctgacgttttacttccgcgccagttttatcgaagatgtttacgctacggcgagtgatttccgcaatatcgccctcttcaaggaagataaagcgacgggtcaccggcaacagcgccagctggtcagaagcgataaagttttcgcccatccccaggccaatcaccagcggactaccagaacgtgccgccagcagggtatccgggtgacgggagtccatgatcactgtaccgtacgcaccacgcagctgcgggatagcacgcagaacggcctcacgcagagtcccgccttgtttcagctcccagttcaccagatgggcaatcacttcggtgtcggtttcagaaacgaaggtatagccacgcgcttttagctcttcacgcagcggttcatggttttcgatgatgccgttatgcaccaccacaatgtgttcagaaacatgcggatgcgcattcacttcactaggttcaccgtgggtcgcccagcgagtgtgagcaataccagtgccgccatgcagaggatgttcttccgctgcctgtgccagcatctggactttaccgaggcgacgcaggcgggtcatatgaccttctgcatcaacaacggccagaccggcagagtcatatccgcggtattccagacgacgtaaaccttcaagaaggatttctgctacatcacgttgcgcgatcgcgccaacaattccacacatagtttttgattccgatttatatcgttgtcggtcaacctgtatgcccgttttttcgggcgccccgagccttgtagagagtggggttatttttatagttactgcttgtgggagggagattatgttatctcctcatcccatgtgaccgggttagccggccagaatcactttttctttaccggacgacgccagccttctttctgagtctgcggcacacggctgatagctaatgcattttcgccgacattacgcgtcacagttgtacccgcagcaatggtcgcgcctttgcctactgttaccggggccaccagctgagtgtcggaaccaacaaacacatcgtcgccgataatggtcttaaatttattcgcaccatcgtagttgcaggtaatggttcccgcgccgatgttaacgttatcgccaatttccgcatcgcccaggtaagtcagatgaccagctttgctgcctttacccagacgcgcttttttcatctcaacgaagttaccgacgtgagcaccttccagcaactcagcaccaggacgcaaacgggcaaacgggccaatggtacaggccgctgccagattcgcatcttccacaacggtatacggactgatttcgcaatcatcgccaatcacgctgtttttaatcacgcaaccggtgccaattttcacgcgatgaccgagagtcacgttgccctcgatgataacgttagtatcaatttcaacatcgcgcccgtgagttagcgtaccacgcagatcaaaacgcgctggatcgcgcagcataacgcctgctaacagcagtttttcagcctgttcggactgataaacacgctccagacgggagagttgcaggcggttattcacgccttctacttcgcttaaacgttgcggatgaacggcgacgatttcacgcccttcctgatacgccagcgcaataatgtcggtgatgtagtattcgccctgagcattattgttggtcagcttcgccagccagcgtttcatatctgcgccgttggcaatcagaatgccggtgttgatctcctgaatctgacgctgctcgtcggtggcatctttgtgctcaacaatgccggtaactttgccgttttcacgggtgatacgtccataaccggtcggatcatccagtttcaccgtcagcagaccaatgccaccctgcggtttagcatcacgcagacgctggagtgtttcgacagagatcagcggcacgtcgccgtagagcattaaaatgtcttcatcatcggcaaagaaaggtgcggcctgctgcattgcatgacccgtacccagctgctctgcctgaagcacccagttaaggttgtcgtctttcagcgcctgttttagcagatcgccgccgtgaccgtacaccaggtgaacgtgcgctgcgcctaattcattcgcagcatcaatgacatgctgaaccatcgctttcccggcaagggtatgcagcactttcggaagatcggaatacatgcgcgtgcctttgcctgcggcaaggatcactacgctcatagcattattcaacatacgcgtcctgactgtaatttgagaacgaatttaaaccgcttcaccttgaaaaaactacatttttttcatcgtgaaatggacagaggataaattgttcaataacggattatccccgctgacgaaagcgccattttcgaccatcgtcacgccttttgtctgcagaaaattaaggcagtaccttaatttaagcgtcaggtggatgtttttgctcttatttcgatcaatgaataaacaggaaaacaggggggttttatatcagcaggatctatgtgaacgctattcaggacgggtcacacgcgcaaaaaaaagccagcctgtttccagactggcttttgtgcttttcaagccggtgttacatcgcttttttggtcaactcgataacgcgcagctgcgcgatcgctttggccagttccgcagacgcctgagcgtaatctacgtcgccgtgagagctgctaatgtgctcttcagccttacgtttcgcttccatggctcgcgcttcgtcgagatcctggccgcgaattgcggtgtcggccagaacggtcacgttgccaggctgcacttcaagaatgccgccagacagatagataaactcttcgtgaccgtgctgtttcacgatgcgaatcataccaggcttaatggcggtgagcagcggtgcgtggccagggtagatccccagttcaccttcgctacccgttacctggattttctcgaccagaccagagaacatttgttgctctgcgctgacgacgtccaggtggtaagtcattgccatatcaccctccgattaaggcgttaaagttttttggctttttccacagcttcttcgatggaaccgaccatgtagaacgcctgctccggcaggtgatcgtattcgccttccatgatgcctttaaagccacggatggtgtctttcagggagacgtatttacccggagaaccggtgaatacttctgccacgaagaacggctgggacaggaagcgctggatcttacgagcacgcgctaccaccagtttgtcttcttcagacagttcatccatacccaggatggcgatgatgtctttcagttcctgataacgttgcaggatggactgaacgccacgcgcggtgtcgtagtgttcctgaccaaccaccagcgggtccagctgacggctggtggagtccagcgggtcaacggccgggtagatacccagagacgcgatctgacggctcagtaccacggttgcgtcaaggtgcgcaaaggtggttgccggagacgggtcagtcaagtcatccgcaggtacgtatactgcctgtacggaggtgatagaaccagttttggtggaggtgatacgttcctgcagaacgcccatctcttccgccagggtcggctgataacctaccgcactaggcatacggcccagcagtgcggatacttccgtaccggccagggtgtaacgatagatgttgtcaacgaacagcagaacgtcacgaccttcgtcacggaatttctcagccatggtcagaccggtcagagcaacgcgcagacggtttcccggcggctcgttcatctggccatacaccagggatactttgtcgataacgttggagtcggtcatttcgtggtagaagtcgttaccctcacgagtacgttcacctacgcccgcaaacacagagtaaccggagtgctcgatcgcgatgttacgaatgagctccatcatgtttacggttttacctacacccgcaccaccgaacagaccaactttaccgcccttagcgaacggacacatcaggtcgataactttgataccggtttccagcagttcctgagagttactcagctcttcgtaggaaggtgctgcgcggtgaatcgcccaacgctcttcttcaccgatctcgcctttcatgtcgaccggttcacccagtacgttcatgatacggcccagagtcgctttacctaccgggacttcaatcgggtgttcgaggtcttttacatccagaccgcgacgcagaccgtcggaggaacccattgcgatggtacgtacgataccgccgccgagctgctgctgaacttccagcaccagacgctcattaccattttgcacctcaagagcatcgtacacgcgcggtacggcatcctgagggaattcgacgtcaactacggcgccgattacctggacaatctttccagtagccatcttaaatcctctacgaaataacctgtttaaaccgcggcggccccgctgacgatctcggtgagttcctgagtaatgctggcctgacgagctttgttgtataccaactgcagctctttaatcaggctgccgccattgtcggtcgcggctttcatcgccaccatacgggcggcctgctcgctggccaggttttcaaccacgccctgataaacctgagattcgacataacgacgcagcagggtatccagcaacgccttcggatcgggttcgtacaggtaatcccaggatttatgtttcagatcatcatcatcacttgccggtaacggcagcagctggctgatggtcggaacctgagacatggtgttaataaatttgttgctgacaatgtaaagcttgtccagacggccttcgtcgtaggcctgcaacatcacttttaccggaccgatcagttcggacagggaagggttatcccccatgccggtgacctgggcaacaacattgccgcccacggagttgaagaagctcacgcctttgctgccgatcattgcgaggtcgcattgaacgcctttgtcggtccaggtcttcatttccgccagcagttttttgaacaggttaatgttcaaaccaccgcacaaaccacggtcggtgctcaccaccaggtagcccacgcgtttaacgtcgcggtcttccaggtaagggtgcttatattccagattaccgtgtgcaaggtgaccaatcactttgcgcatggtttctgcataaggacggctggccgccatgcgatcctggcttttacgcattttggaagcggcgaccatctccatcgctttagtgatcttttgcgtgttctggacgcttgcgatcttactacgtatctcttttgcgccggccatgagcttctcctcaatgccttgcggcctgccctaaggcaagccgccagacgttaccaggattgggttgctttgaaggaatcgaggatgcctttcagcttgccttcgatttcgtcgttgtagccaccggtctggttgatctcttgcatcaacggagcgtgatcacggtcgacgtaagccagcagagcggcttcgaagctgccaattttgctcagttcaacatccgccaggtaaccacgttctgctgcgaacagaaccagagactgctgcgcaacggacatcggcgcatactgtttctgtttcagcagttcggtcactttctgaccgtggtcaagctgcttacgtgttgcatcgtcaaggtcggatgcaaactgagagaacgctgccagttcacgatactgtgccagagcggtacggataccaccggacagttttttcatgatcttggtctgtgctgcaccaccaacacgggatacggaaatacccgggttaaccgcaggacgaataccggcgttgaacaggttggtttccaggaagatctgaccatcggtaatggagattacgttggtcggaacgaacgcagaaacgtcacccgcctgagtttcgataatcggcagtgcggtcagagaaccggttttccctttcacttcacctttggtgaaggcttcaacgtattcggcgttaacacgtgcagcacgctccagcagacgagagtggaggtagaaaacgtcgcccgggaatgcttcacgtcctggcggacgacggagcagcagggagatctgacggtaagcaacagcctgtttagacaggtcatcgtaaatgatcagcgcatcttcaccgcggtcacggaagtattcgcccattgcgcaaccggcatacggtgccaggtattgcagtgcagcggattcagacgcggttgctaccacaacgatggtgttagccagtgcgccgtgctcttccagtttacgtaccacgttagaaatggtggacgctttctggccgatagcgacatagatacatttgataccggaatcgcgctggttgatgatggcatcgatagccagtgcggttttacctgtctgacggtcaccgatgatcaattcacgctgaccacgaccgattgggatcatggagtcaacggctttataaccggtctgtaccggctgatctacggactgacgttcgataacgcccggagcgattgcttctacagcagagaagccgtcgtgatccagcggacctttaccgtcgattggtgcacccagagtgttaaccacacggcccagcaggccacggccaaccggaacttccaggatacggccagtacacttaactttcatgccttcggcaaggtcagcgtacggacccataacaaccgcacctacagagtcgcgctcgaggttcagtgcgatagcgtaacggttacccggcagggagatcatttcaccctgcatacaatcggccaggccgtgaatgcggataacaccgtcacttacagaaacaatagtaccttcgttgtgagcttcactcacaacattgaactgagcaatgcgctgcttgatcagttcgctgatttcggtggaattcagttgcatgctccagtccccttaagactgcaagacgtctgcaaggcgctcaagacgaccgcgtacgctgccatcaatgaccatatcacccgctcggatgataacgcctgccattacagacttatcgattttgcaattcagcttaactttgcgactcagacgtttttccatcgcagcagaaattttcgcgagctgttgttcactcagtgcggcagcggaaatgacgtctacctcagcggtagcctcactcacggcacgcaggtgaataaactgctccagaacatccgggagcgcgttaagacgaccattttcagccataacccgaatcaggttctgaccgttttcgtccagttgctcaccacaaactgcgataaagctctcggcgagcgtttctggcgcaagcgcgccagagagaagctctgccatttgttcgtttttggttacctcggcggcaaacgccagcatgtcctgccagcgttctacactttggtgttcgacggcaaagtcaaaagctgctttggcgtaggggcgagctaccgtaataaattcagacatcagcccctccctccttacagttcagcgacaagtttatccacgatgtcgctgttagcagcttcatccacggaacgttcgatgatcttctcggcgccagcaacagccaggatagcaacttgcttacgcagctcttcacgggcacgtttacgctcggcttcaatttccgcctgcgcctgggccacgattttagtacgttcctgttctgcctcagctttcgcttcgtccagaatctggctgcggcgtttgttcgcctgctcgatgattacctgggcttccgctttcgcttttttcagctggtcggtcgcgctggcctttgcaaggtcaaggtccttatgtgctcgttctgcggaagcaaggccgtcagcaatttctttttgacgtttttcgatggctgccattaatggcggccatacgtacttcatgcagaacagaacgaacaggacaaacgcgatggcctggccgaggattgttgcgttaagattcacagcacaatgcctctatttagttaacgttctgatattgctctttaaataaaagcaacgcttattacgcgacagcgaacatcacgtacagacccagacctacagcgatcatcgggatagcatccaccagacccataacgataaagaactgagtacgcagcagaggaatcagatcaggttgacgcgctgcgccttccaggaatttacccccgaggatgccgataccgatcgcagcaccgattgccgccagacccatcatcacagcggcagccatgtacagcagatccatattcaggttttccatgacagtctccagtttgtttcagttaaaacgtagtagtgttggtaaattaatgttcttcagacgccatgctcagatagacgatcgtcagaaccatgaagatgaaggcttgcagcgtaatgatcaggatgtggaaaatggcccacggcacattcaggatccactgactccaccacggcaacagaccagcaatcagaatgaaaatcagctcaccggcatacatgttaccgaacagtcgcaaaccgagactaactggtttggacagcaggcttaccccttcaaggattaagttgacaggaatgaacgcccagtgattgaacggctgcagcgtcaactctttcgtgaagccgccgatgcctttcattttgatgctgtagaacagaatcaggataaatacgcccagtgccatagacagcgttacgttcacgtccgcagacggaaccacacgcagtgcaggcagacccagtacatgttcagcaatgtacggcagcaggtcgataggcagtaaatccatcaggttcatcaggaatacccagacgaagatcgtcagggccagcggagcaatcagcttgcttttgccatggtacatgtctttcacgctaccattaacaaagccgatcaccagctcaatcgcggtctgaaacttacctggcacaccgctggtcgcctttttggctacgctacggaataaaaccaggaacaacagacccagcaccacgctgaagaacatggagtcaatattgattgtccagaaggtggctggggggttttgtggatccaccaggctgaatgtacgcaggtccagctgaaggttattcaggtggtgtcctatgtaatcctgcggcgtcatattttcactagccatgatgccttttaccctttgttgttaattacagccggtgccagtatctgaaccaccagcaccaaaacccacgtaacgatcagcggcaagaataccgcctttaaaaccgccaacgccaccaccagtaacaccaacatcgccagaactttgaaagcttcgccaaatgcgaatgtccaggccacccggcctttcgctggtgtatgcgcctggtgacgccaggcaaatatcataaacaaaacgttaggcagaaagactgccaggcccccgcttattgcagagacgccccagaaggggtctttgaggctgaacagcaatccacttgctatcaccaccagtaactgaacgagcagaagcttccgagcaacgtttcgactcacgaggctcacagacatcacgtttttcactcctgctcccttcgaggtatgccgcgtgtcgtataaaactttctttaaggcttagagtcaagcatcaaaaagcggtcaaattatacggtgcgcccccgtgatttcaaacaataagtagccaaaaggtgaataaatgtttaaatatttttccagtgcatacaattgcgacttttctgctaaccctgttcgatcatgaaaaactgtaaataacgcgtaaacactggtgataaagcgtgcttcagatcacatattgcgcatgttcgcgcacagcatatttatttacttggcaaatgatgcctttgcaagtttatgatatttcagtctaaaaacagatactgttttaataaatgacatttacacaacaaaaaccacccattgacatttttaataatgttttaacagccaatgatggttcttagcgccgatttttagcagactgatattttcactaatgacttattttctgcttaccaaaaaaagccacgttatcttgttgatgcaaaagagtgaacgtggcgttaaatgtaaccagttatatcagtagaaaacctggttgttgttaacagtctaaccggtcaattttttatgatttttttgataaaaattaaattttatttgctttaatcaccaccagatgacgttcgccatccagggctggaacctgaagtttaaccacactttcgacctgatattcttcgggcaacaaagcgatttcatcttccggcatttgccctttcagcgcgtagaaacggccttgctcaccaggaagatggtggcaccagctcaccatatcgttcagagaggcaaaagcgcggctaattacgccatcaaatggcggctcactaggaaactcttctaccctgctctgtactggttcaatattctccagtttaagctcatgttgcacctgacgaaggaaacgcacgcgtttaccaaggctatccaacagagtgaaatgggcttcaggacgcacgatagagagtggaatgcctggcagtcctggtccggtgccgacatcgataaaccgttcaccttgcagatacggtgccaccacaatgctatcgagaatatggcgtaccagcatctcattaggatcgcggacgctagtcaggttgtacgctttgttccatttatgcagcatattcacgtaggcaataagctggtttttctggtgatcggtaaggctaatacctgcgtctttcagcagtaaggagagtttgttgagcacggtgattacctgttcttgatgcgttgcctggtaagcgggtgcttaccaggcatttttaatgcgttatgcgctacgacgcagcataccctgttttttcagccacaccagcagaatggagatggccgcaggcgtgacgccagaaatacggctagcttggccgatagaggctggtttgtgatcgttaagtttggcgatcacttcgttagaaagaccggatacctggcggtaatccagtgtcgcgggtagcagggtgttctcgttacgcagctgcttttcgatctcatcttgctggcgcgcgatataaccttcgtatttaacctgaatctcaacctgttccgccgcctgttcgtctgtcaacgcaggggcaaacggcgtcagcgtggttaatttttcataagtcatttccggacgacgcagcagatcttcaccactggcttcacgggaaagcggcgcagtcaggtgagcattcacttcggctgcagcttccgcgctcggggttacccaggtgcttttcagacgctgacgctcacgctcgatattctcaagtttctcgttaaagcgcgcccaacgttcgtcatccaccaggcccagttcacgaccgatttcagtcaaacgcagatccgcattatcttcgcgtagcatcagacgatattctgcgcggctagtaaacatacgatacggttctttggttcctaaagtgcacaggtcatcaactagtacgccgagatacgcctgagaacgtgccggagcccaaccttctttgtcagcagacagacgggcagcgttaagaccggccagcaaaccttgcgcagcggcttcttcgtaaccggtagtgccgttaatctgaccagcaaagaacagcccctggataaacttgctctccagcgtcggtttcaggtcgcgaggatcgaagaagtcatactcaatggcataacccggacgcacgatcttcgcgttttccatcccctgcatagagcggacgatttgcatctgcacatcgaacggcaggctggtggagataccgttcggataaatttcattagaggtcagtccttccggttcaaggaagatctgatgctgatttctgtcggcgaagcgcatgactttgtcttcgatgctcgggcagtagcgtgggccgacaccttcgatcacccctgcgtacattgggctacgatcgaggttactgcggatcacatcatgggttttctcgttggtatgagtgatataacacggcacctgctggggatgctgggacgcattgcccataaagctgaataccggcattgggttatcgccatgctgttgcgccagtacgctaaagtcgatggttcgagcatcaatacgcggtggtgtcccggttttcagacgaccaacgcgcagcggcagttcacgcaaacggcgagaaagcggaatggacggcggatcaccagcacggccaccgctgtaattatccagaccgatatgaattttaccgtcgaggaacgtcccaacggtgagcacgacggctttggcacggaacttcagtcccatttgggtaacagcaccgaccacgcgatcgttttcgacaataagatcttcaaccgcctgctggaagatcatcaggttcggttggttctccagcgccgtacgtaccgcctgacggtagagcacacgatccgcctgagctcgggtagcgcgaaccgccggtcctttgcttgcgtttagtatcctaaactggatacccgcctgatcgatcgctttcgccatcagaccgccgagtgcatccacttcttttaccagatgtcccttcccaataccgccgatcgccgggttgcagctcatctgccccagagtgtcgatattgtgtgtcaaaagcagagtctgttgacccatacgcgccgcggccatcgcggcctcggtgcctgcatgacccccgccaatgatgatgacgtcaaaaggatccggataaaacatggtgattgcctcgcataacgcggtatgaaaatggattgaagcccgggccgtggattctactcaactttgtcggcttgagaaagacctgggatcctgggtattaaaaagaagatctatttatttagagatctgttctattgtgatctcttattaggatcgcactgccctgtggataacaaggatccggcttttaagatcaacaacctggaaaggatcattaactgtgaatgatcggtgatcctggaccgtataagctgggatcagaatgaggggttatacacaactcaaaaactgaacaacagttgttctttggataactaccggttgatccaagcttcctgacagagttatccacagtagatcgcacgatctgtatacttatttgagtaaattaacccagcttcccagccattcttctgccggatcttccggaatgtcgtgatcaagaatgttgatcttcagtgtttcgcctgtctgttttgcaccggaatttttgagttctgcctcgagtttatcgatagccccacaaaaggtgtcatattcacgactgccaataccgattgcgccaaagcggactgcagaaagatcgggcttctgttcctgcaatgcttcatagaaaggagaaaggttgtccggaatatctccggcaccgtgggtggagctgataaccagccagatcccactggcaggtaaatcttctaacagcggaccgtgcagcgtttcggtggtaaaacccgcctcttccagcttttcagccaggtgttctgctacatattcggcaccgccgagggtgctgccgctgataagagtgatatctgccataaaccgccacctttattaagagtggcgtattgtacgctgtgaacgcgttgggatctacctgtggaaaagtatgggattaaaaaagccgatcagggcttgatggtacgcatgatcgggttttgcaggacgatcaatgtctcggtggactgaatttcatcaattgtttggatcttgttgataagtacatgctggagagcgtcgatgctacggcacatcacttttataaagatgctgtagtggccggttgtgtaataggcttcagtgacttcatcaaggctttccagctttgccagcgcggaagggtagtctttggcgctctttaatataatgccgataaagcagcctacgtcataaccgagctgcttcgggctgacatcaatacgcgccccggtaatgatccccgcctgcttcattttctctactcgaacgtgaatcgtccccggactgacgccaaattgtttcgccagttcggcgtaagcggtgcgcgcattgcccattaatgcttccaggatgccacggtccagattgtcgatcagataattttccataggattttcttatgcggattgatgattcattctattttagccttcttttttaatgaatcaaaagtgagttaggctttttattgaatgattattgcatgtgtgtcggtttttgttgcttaatcataagcaacaggacgcaggagtataaaaaatgaaaaccgcttacattgccaaacaacgtcaaattagcttcgtgaaatctcacttttctcgtcaactggaagaacgtctggggctgatcgaagtccaggcgccgattcttagccgtgtgggggatggcacgcaggataacttgagcggctgtgaaaaagcggtgcaggtaaaagtgaaagctctgcctgatgcccagttcgaagtggttcatagtctggcgaagtggaaacgtcagaccttagggcaacacgacttcagcgcgggcgaagggctgtacacgcacatgaaagcccttcgccccgatgaagaccgtctttctccgttgcacagcgtctatgttgaccagtgggactgggaacgcgtaatgggcgacggtgagcgtcaattcagcactctgaaaagcacggtagaggcgatctgggcgggaattaaagcaaccgaagctgcggttagcgaagagtttggcctggcaccgttcctgccggatcagatccacttcgtacacagccaggagttactgtctcgttatccggatcttgatgccaaagggcgtgagcgggcgatagcgaaagatcttggcgcggtattccttgtcgggattggcggcaagctgagcgatggtcatcgccacgacgtgcgcgcaccggattatgatgactggagcaccccgagtgagctgggccatgcgggtctgaacggcgatattctggtgtggaacccggtactggaagatgcgtttgagctttcctccatggggatccgtgtagatgccgacacgctgaagcatcaactggcgctgaccggtgacgaagatcgcctggagctggagtggcatcaggcgctgctgcgcggtgaaatgccgcagaccatcggcggcggtatcggccagtctcgtttgactatgctgctgctgcaactgccgcatatcggccaggttcagtgtggagtatggccagctgctgttcgcgagagcgtcccttctctgctgtaataatttatcgccgccagcgtctgagcaggcggcttcgcatcccggtatcaaagcgccagatatgatcgaaaatgcgcatgatgccgggtttgccgtgtgcgctcatcgccacggcatgaaagcgatgctgatgtacccgctgcagctctttcactttactcgtcacgtcgtcaggcaaccgctgagcgataaaatcagaaatcaccaccgcatcggcatcaaaccattccctgctttgcaagcgttccataatggcgcgaaaacaactggcaagatcggtgccgccacgaaactgctggcttaaaaaacggattgcttgttcgatgccttgtgggccactaagctcataacggacgatctcggtggaaaatagcataatatagcagcgccggttttctgcgagagcaatgcgcatcaaggccaggcagaacgctttcgcacactgttcattaaagccgcccatactgccggaagtatccacacagacaataaacggcccgcgcggctgttcatcgtaatctttatgtaccaccggacgttcgatcactttttcacgccagctctcaccgtgcaggcgataggtgagcaactgtttttccaccagccgacggtaaaactcatactccagttccgttatccctagtgtcgccagttctggcggcaggagacgtaaaatatcatcgctttgttgcagaccatcaacctgctcaggaaccgtcgccggttcgcgcaccatggtgcggaaggtttccatctgcgcatcgttgcgcggtatacttttggcttcccgagaacgccccagctgctctgccaggcgtttcagttccggctgttcgttaagaaattcaccgtatttcacaatcaactgatagtcgccacgtttaagctgaccggcgctcatatcccacagacgaccagctgcagtattgttatctgcgagaatcggttcaagttgtccgctcagcgtcatgcgttcctgaacttcactcaacagttgttcgcgttcttcttctaatagctgttgatttaacgtcgttgcttgcacgatcagacttaaacgccaacgctggagaaaaagcgtgtgtaacgcactagtgatcgtgctgttagcatcaaccaactgtcgggcttgttctgcccatggagaattcagacgatgcagtaagtccaggatctgtggtagctgcacaataaactgtggcgtggagaggagctggctttgctgatagcacatcacctcttcggtgagttccggcgggactcgggcatctttcagccgactgcgcagcgcttcacgccagcggggaacatcatcagtgattgccgccttcaggcgtgggaatttttcaaagaagaccgccagctgcggactggccagcagtgcgatgatcatctcttcgatcaatccctcttcgctgacggccagcatcacattaagcgtatccagcgttagcattgttgtgcctggcgaatctgtgcaccgacatcctgtaggctggcttcaatgcgacctaaccagtcgccagggataaacagacatttttgctgttcgctgaataaagcgtgttgcttgcgccagtcgctttcaagctcttccagttgttgttttatttcaccaggcagaccttcagcgctactaccgggaagtgccagcgtactgccttgtaaacttacatcgcgaacgacaagatgttgggcgctatcaacttccagattcagtttctgggcaaagccgataccgttcagtttaccgcgaatttcaccacctttgctcagccactgttccagcgcgctacgctcaaaggagatatgaaccacttccatatcatgcagttttaacggtttttgcagcagtagagtcagagtggaagcagtaacgttaacaggaagttgatactgctgacgacggctgaaaatgccgcccagacgaattaccgttaaggctgttttatcgctttgttgctgctggagttgcaggtgacgttgcacaatcgcgccaaggcgagtcaacatcccttgctgttgccaggcgtgaccggtcatcaatacatcaatttgttgttgtatcaaattcaggctttgcgcgtcataccacaggcaatctttcagcaaaatgagatctaccggggcaacagcactgcgaccgctaaaaaaggcgctggcctgcaataatcggatcgcttttttccagcgacgatcgctgacataaggcgcatccggtaatttatccagttgctggcgcagcataaaaatcagctcaaatacatgatcgggcagcgtaatttcaccaatctctttctgccagcgttcatattcttcatctgtgacctgcaaggcatcaggaaccggattgtcgttttcatcctgttgactggtcagcatggagcggaaattcgctttatcctgcactttatctaaccacagacgaatcagcatgcggtcatataacgcttccagactgctgtctgcttccggcagctcgttggaggccgccaccagcagacgcatcgggattttttctacgtgtgcaccgttgcggaactggcgctcgttaatggcggtgagcaaggtattaagaattgccgggcccgctttccagatctcatccagaaagacaatttctgcttccggcaggtaaccgctggttaaacgttcatagcgcccttcatcttttagcgcctgaatagaaaggggaccaaaaacttcttccggcgtggagaagcgggtcatcagatattcaaacgcgcgggcattctgaaaggcgaattttaagcgccgggcgatcaaacttttggcaatacctggcgggccaaggaggaacacactttcaccacttaatgccgctaataaacacaagcggatggcgtggctacgttcataaagccccttttccaagctactgctcaggcgggaaattctttccgctaataaatgagggtgagccataatgaagtggcgtcctttcgtcaaaagttctgcgtaaattgcgagtatagacgtttcttgctggtggctaaaatagtctcaaagggggggtatttttctttgagccaggttaatgtggccgcatttaggagtacgattttgccgttaatcgtgcatactgtgcgcttttttgtgggccaagggactaagcacacatttcatatttcaacgaaagactagtctatgagcactgataataagcaaagtttgcccgcgattaccctcgcggcgattggagttgtctacggcgatattggtaccagcccgttatatacacttcgtgaatgtttgtccggccagtttggttttggcgttgaacgcgatgccgtgtttggctttttaagcctgatcttctggctgctaatctttgtggtttccattaaatatctcaccttcgtgatgcgggcagataacgccggtgagggggggatcctgacgttgatgagccttgccgggcgtaatacgagcgcgcgaaccacaagtatgctggtgattatggggctaatcggcggcagctttttttatggtgaagtcgtcataacacccgctattagcgtgatgagtgccattgaaggtctggaaatcgtcgccccgcagctggatacctggatagttcccctcagtattatcgttctcactttattatttatgattcaaaaacatggcacggctatggtcggtaagctgtttgcgccgatcatgctgacctggtttttgattctggcaggactggggttacgtagcattattgctaacccggaagtgctgcatgcgctgaatccaatgtgggcggtgcatttcttccttgaatacaaaacggtttcttttattgcattaggggcagtggtgttgagcattacgggggtcgaggcgctgtatgctgatatggggcactttggtaagttccctattcgcctggcgtggttcaccgtcgtattaccttccttgacccttaattacttcggtcagggagcgctgttgttaaagaacccggaagcgattaagaacccgttcttcctgttggcaccggactgggcgctgatcccgctgctgatcatcgccgcactggcgacggtaattgccagccaggcggttatctctggcgtcttcagtttgacgcgtcaggcggtacgtctgggatatttgagcccgatgcgcattattcacacctccgaaatggagagtgggcaaatctatattccgtttgtgaactggatgctctatgtcgcggtcgtgattgtgattgtcagctttgagcactccagcaacctggcggcggcgtacgggattgcggtgaccggaaccatggtgctgacgtctattctcagcactaccgtggcacgtcagaactggcactggaataagtattttgttgcgctgatcctgattgctttcctttgtgtcgatattccattgttcaccgctaacctcgataaactgctctccggcggctggttgccattgagcctcggtactgtgatgtttatcgtgatgaccacctggaagagcgagcgtttccgcttgctgcggcggatgcatgaacatggtaactctctggaagcgatgattgctagcctggagaaaagtccgcctgttcgcgtgcccgggaccgcggtgtatatgagccgtgcaatcaacgtcattccctttgcgctgatgcataaccttaaacataacaaggtattgcatgagcgggtgattctgttaactctgcgcaccgaagacgctccatatgtccataacgtccgtcgggtacagattgaacaactgagccccactttctggcgcgtggtggcaagttatggttggcgagaaacgccaaacgtagaagaagttttccaccgctgcggtctggaaggattaagttgccggatgatggaaacctccttctttatgagccatgagagcttgatcctcggcaaacgcccgtggtatttgcgtctgcgcggcaagctgtacttgctgctgcaacgtaatgcgctgcgtgcaccagatcaatttgaaatcccgccaaacagggttatcgaactgggtactcaggtcgaaatctaacgccagacgcctcctttcttcataagggggcgtttttgttttcatggttaatcaccatgtaaaacgtttcgaggttgatcacatttccgtaacgtcacgatggttttcccaactcagtcaggattaaactgtgggtcagcgaaacgtttcgctgatggagaaaaaaatgaaaaaaggcaccgttcttaattctgatattagtagcgtgatctcccgtctgggacataccgatacgctggtggtgtgtgatgctggtttacccatccccaaaagtacaacgcgtatcgatatggcattaacccagggtgtaccttcttttatgcaggtgctgggcgtcgtcacaaatgaaatgcaggtcgaggcggccattatcgcggaagagatcaaacaccataatccgcaactccacgaaacgttgctcactcaccttgagcagctgcaaaaacaccagggaaataccattgaaattcgttacaccacgcatgaacaattcaaacaacaaaccgcagaaagtcaggcggtaattcgcagcggagaatgttctccgtatgcgaatatcattctctgtgctggcgtgacgttctgaggccgtcatggaagcattacttcagcttaaaggcatcgataaagccttcccgggcgtaaaagccctcagcggcgcagcgttaaatgtctatccgggccgcgtgatggcgctggtgggcgaaaacggcgcgggtaaatccaccatgatgaaagtgcttactggcatctatactcgcgatgccggtacgcttttatggctggggaaagaaacgacatttaccgggccaaaatcttcccaggaagccgggattgggattatccatcaggaactgaacctgatcccgcagttgaccattgccgaaaacattttcctcggtcgtgagtttgttaatcgctttggcaaaattgactggaaaaccatgtatgccgaagcggataaattgctggctaaacttaacctgcgctttaaaagcgacaagctggtgggcgatctttccatcggtgaccagcaaatggttgaaatcgccaaagtgctgagctttgagagcaaagtcatcattatggatgaaccgaccgatgcgctgaccgataccgaaaccgaatccctgttccgcgtcatccgcgagctgaaaagccaaggccgcggtattgtctatatctcccaccgcatgaaagaaatcttcgagatttgcgatgacgttaccgtttttcgtgatgggcaatttattgctgagcgcgaagtggcaagtctgaccgaagatagcctgattgagatgatggtgggtcgcaagctggaagatcaatatccgcacctggacaaagcgccgggagatatccgcctgaaagtcgataatctctgcggacctggcgttaacgatgtctcttttactttacgcaaaggcgaaattcttggcgtctctggtttgatgggcgcaggtcgtaccgaactgatgaaagtgctctacggcgcactaccgcgcaccagcggttacgtcaccctggatgggcatgaagtcgttacccgtagtccgcaggatggcctggcaaacggcattgtgtatatctccgaagaccgtaaacgtgacggtttagtgttgggcatgagtgtaaaagagaacatgagcctgacagcgctgcgctacttcagccgcgctggcggcagtttgaagcatgccgatgaacagcaggctgtgagtgatttcattcgtctgtttaatgtgaaaactccgagcatggaacaggcaattggtctgctttccggtggcaatcagcaaaaagtggcgattgcccgcggtctgatgacacgccccaaagtgttgatccttgatgaacctacccgtggcgtagatgtcggcgcgaaaaaagagatctatcaactgattaaccagttcaaagccgatggcttgagcatcattctggtgagtagcgagatgccagaagtattaggcatgagcgatcgcatcatcgtcatgcatgaagggcatctcagcggggaatttactcgtgagcaggccacccaggaagtgttaatggctgccgctgtgggcaagcttaatcgcgtgaatcaggagtaaaaaaatgacaacccagactgtctctggtcgccgttatttcacgaaagcgtggctgatggagcagaaaagccttatcgctctgctggtgctgatcgcgattgtcagcacgttaagcccgaactttttcaccatcaataacttattcaatattctccagcaaaccagtgtgaacgccattatggcggtcgggatgacgctggtgatcctgacgagcggcatcgacttaagcgtaggttctctgttggcgctgaccggcgcagttgctgcatctatcgtcggcattgaagtcaatgcgctggtggctgtcgctgctgctctcgcgttaggtgccgcaattggtgcggtaaccggggtgattgtagcgaaaggtcgcgtccaggcgtttatcgctacgctggttatgatgcttttactgcgcggcgtgaccatggtttataccaacggtagcccagtgaataccggctttactgagaacgccgatctgtttggctggtttggtattggtcgtccgctgggcgtaccgacgccagtctggatcatggggattgtcttcctcgcggcctggtacatgctgcatcacacgcgtctggggcgttacatctacgcgctgggcggcaacgaagcggcaacgcgtctttctggtatcaacgtcaataaaatcaaaatcatcgtctattctctttgtggtctgctggcaagcctggccgggatcattgaagtggcgcgtctctcctccgcacaacccacggcggggactggctatgagctggatgctattgctgcggtggttctgggcggtacgagtctggcgggcggaaaaggtcgcattgttgggacgttgatcggcgcattaattcttggcttccttaataatggattgaatttgttaggtgtttcctcctattaccagatgatcgtcaaagcggtggtgattttgctggcggtgctggtagacaacaaaaagcagtaataacgactacaggacatcttgaatatgaacatgaaaaaactggctaccctggtttccgctgttgcgctaagcgccaccgtcagtgcgaatgcgatggcaaaagacaccatcgcgctggtggtctccacgcttaacaacccgttctttgtaagcctgaaagatggcgcgcagaaagaggcggataaacttggctataacctggtggtgctggactcccagaacaacccggcgaaagagctggcgaacgtgcaggacttaaccgttcgcggcacaaaaattctgctgattaacccgaccgactccgacgcagtgggtaatgctgtgaagatggctaaccaggcgaacatcccggttatcactcttgaccgccaggcaacgaaaggtgaagtggtgagccacattgcttctgataacgtactgggcggcaaaatcgctggtgattacatcgcgaagaaagcgggtgaaggtgccaaagttatcgagctgcaaggcattgctggtacatccgcagcccgtgaacgtggcgaaggcttccagcaggccgttgctgctcacaagtttaatgttcttgccagccagccagcagattttgatcgcattaaaggtttgaacgtaatgcagaacctgttgaccgctcatccggatgttcaggctgtattcgcgcagaatgatgaaatggcgctgggcgcgctgcgcgcactgcaaactgccggtaaaagcgatgtgatggtcgtcggatttgacggtacaccggatggcgaaaaagcggtgaatgatggcaaactagcagcgactatcgctcagctacccgatcagattggcgcgaaaggcgtcgaaaccgcagataaagtgctgaaaggcgagaaagttcaggctaagtatccggttgatctgaaactggttgttaagcagtaattttaatcaggttgtatgacctgatggtgacataaatacgtcatcgacagatgaacgtgtaatataaagaaaagcagggcacgcgccaccctaacacggtggcgcattttatggacatcccgaatatgcaaaacgcaggcagcctcgttgttcttggcagcattaatgctgaccacattcttaatcttcaatcttttcctactccaggcgaaaccgtaaccggtaaccactatcaggttgcatttggcggcaaaggcgcgaatcaggctgtggctgctgggcgtagcggtgcgaatatcgcgtttattgcctgtacgggtgatgacagcattggtgagagcgttcgccagcagctcgccactgataacattgatattactccggtcagcgtgatcaaaggcgaaagtacaggtgtggcgctgatttttgttaatggcgaaggtgagaatgtcatcggtattcatgccggcgctaatgctgccctttccccggcgctggtggaagcgcaacgtgagcgtattgccaacgcgagtgcattattaatgcagctggaaagtccactcgaaagtgtgatggcagcggcgaaaatcgcccatcaaaataagactatcgttgcgcttaacccggctccggctcgcgaacttcctgacgaactgctggcgctggtggacattattacgccaaacgaaacggaagcagaaaagctcaccggtattcgtgttgaaaatgatgaagatgcagcgaaggcggcgcaggtactgcatgaaaaaggtatccgtactgtactgattactttaggaagtcgtggtgtatgggctagcgtgaatggtgaaggtcagcgcgttcctggattccgggtgcaggctgtcgataccattgctgccggagatacctttaacggtgcgttaatcacggcattgctggaagaaaaaccattgccagaggcgattcgttttgcccatgctgccgctgcgattgccgtaacacgtaaaggcgcacaaccttccgtaccgtggcgtgaagagatcgacgcatttttagacaggcagaggtgacgcttggctacaatgaaagatgttgcccgcctggcgggcgtttctaccagtacagtttctcacgttatcaataaagatcgcttcgtcagtgaagcgattaccgccaaagttgaagcggcgattaaagaactcaattacgcgccaagtgctctggcgcgtagcctcaaactcaatcaaacacataccattggcatgttgatcactgccagtaccaatcctttctatagtgaactggtgcgtggcgttgaacgcagctgcttcgaacgcggttatagtctcgtcctttgcaataccgaaggcgatgaacagcggatgaatcgcaatctggaaacgctgatgcaaaaacgcgttgatggcttgctgttactgtgcaccgaaacgcatcaacctagccgtgaaatcatgcaacgttatccgacagtgcctactgtgatgatggactgggctccgttcgatggcgacagcgatcttattcaggataacagcttgctgggcggagacttagcaacgcaatatctgatcgataaaggtcatacccgtatcgcctgtattaccggcccgctggataaaactccggcgcgcctgcggttggaaggttatcgggcggcgatgaaacgtgcgggtctcaacattcctgatggctatgaagtcactggtgattttgaatttaacggcgggtttgacgctatgcgccaactgctaagtcatccgctgcgtcctcaggccgtctttaccggaaatgacgctatggctgttggcgtttaccaggcgttatatcaggcagagttacaggttccgcaggatatcgcggtgattggctatgacgatatcgaactggcaagctttatgacgccaccattaaccactatccaccaaccgaaagatgaactgggggagctggcgattgatgtactcatccatcggataacccagccgacccttcagcaacaacgattacaacttactccgattctgatggaacgcggtagcgcttaattactcgctttcacttggaacgcggttcggcttagatttacgctgtcttttgatcaaattattaccatcggttgttttcagaagcatgaacattgctgcactagcaacagtaataatgcccattgtgataaacgtatagtggaattgttcgacagtcgttgtgccttccattccttcataaacgcgaaggacggccgcacttacagcaacgcctaaactaatgctcagttgctgcgtgaccgccagaacactgttaccgctgctggcattgtcatcggtcagatcggcaagtgtgatggtattcatcgcggtaaactgcgtgctcatagccatccctaatataaacaacggcaagatcagcatccatatagccattgctggactttgcaaagagaactgagcgatcattagcccaataatcaccgtgatccccactaacgtatggcgatagcccagacgacgtaagacttgggtaaccatgctttttgcaataatggaacctaacgctgtcggtgccatcatacagccagcaataaacgcctgataaccaaatcctacctgtaacatcaatggcataaggaacggtacacagccggtccccagacgggttgcaatattgcctacgataccgatgctgaaagtgcgggttttaaataaatctaaactaattaatgggtttggcgtgcgtcgtgcatggagaatatagagaagcagtaacccgatgctggtgacaattaccgtcaaggcaatccagctggcgacaatcttttccccgaatagctctattccgctactgaagagaacaaggctgaggccaaacagcaaaaagccagtgatatcgaatctgcgtcgtgcggtggtgaaattgggcatatgtttgcgcgcgtaaagaaggcccgcaatacctatggggatattgattaaaaatatccagtgccaggttgcccaggtgaccagcacgccgccaagaacggggcctaaaattggccccaccagacccggcatggcgacaaaattcaatactggaagaagttcattacgaggataagcgcgcagtaaggccagccgagcaacaggcatcatcattgcgccgcctatcccctgaataacccggaagacaaccagctgtggtaggctattagaaagtgcgcaggccagagaacccaatgtgaacagactcacggcaagggtaaaaatgcgacgcgtaccgaagcgatcggctagccatccgcttaccggaataagcatcgccaccgtcagcgtataactgatgatggcactttgcatcgcgagaggagaacgattaaggctatgagcgattgcgggtaaggcggtattaagaatagtggcatcaagtgcctgcatgaagaaggccatcgccgcgatccacggcaaacccgccatactgcgcttctttttatcgctcattcaatgtcctgttatcgggttatcacttatcaggactgcgtagcagcgcctgacaagctttaaatgccgcgtcgccatcgctttggataatcgcatcgacaatcgcctgatgcagatccagctttatcactgtgtcgctggtaatactcgtgaagtaagtgtgataaacgctatggaataggctggcgaaactggtcaaaaacggattggcgctcatttcatagatatgctcatgccaggccatatcgacttcgatccagcgttcacggcgaaagttctcttttaatgccgccatttcggccattaacgtattgagatgcgctttctgttccgcggtgccaaccgttgctgccagtaggcaggcttgcggctccagacagatacgcataaccagaaagtgatcgatgacctgatgaaagttctcttctgtcatccaccaggtaagcaattcctgatcaagaaaattccagttgctttgtggcatgacccgagtaccaattcgcggtcgcggtaaaaccatcccttttgccgttaacgttttgaccgcttcgcgtaccgctgtacgactcactccaaattgctcgcccagctcaatctcaccgggcaaaatggtgccgggttcatattcaccttttaagatccgttgcgccagcttctcagccagaacatagctaaggtttttctgtgcagctaactgttgtgcgcttaaaggcattacttatcttcctttttctttttattcctccttagtatgccaccaggaagtgtgattacggttgcaaaaacggcaaattgcttgttttatggcacattaacggggcttttgctgaaaaaatgcgcggtcagaaaattattttaaatttcctcttgtcaggccggaataactccctataatgcgccaccactgacacggaacaacggcaaacacgccgccgggtcagcggggttctcctgagaactccggcagagaaagcaaaaataaatgcttgactctgtagcgggaaggcgtattatgcacaccccgcgccgctgagaaaaagcgaagcggcactgctctttaacaatttatcagacaatctgtgtgggcactcgaagatacggattcttaacgtcgcaagacgaaaaatgaataccaagtctcaagagtgaacacgtaattcattacgaagtttaattctttgagcgtcaaacttttaaattgaagagtttgatcatggctcagattgaacgctggcggcaggcctaacacatgcaagtcgaacggtaacaggaagaagcttgcttctttgctgacgagtggcggacgggtgagtaatgtctgggaaactgcctgatggagggggataactactggaaacggtagctaataccgcataacgtcgcaagaccaaagagggggaccttcgggcctcttgccatcggatgtgcccagatgggattagctagtaggtggggtaacggctcacctaggcgacgatccctagctggtctgagaggatgaccagccacactggaactgagacacggtccagactcctacgggaggcagcagtggggaatattgcacaatgggcgcaagcctgatgcagccatgccgcgtgtatgaagaaggccttcgggttgtaaagtactttcagcggggaggaagggagtaaagttaatacctttgctcattgacgttacccgcagaagaagcaccggctaactccgtgccagcagccgcggtaatacggagggtgcaagcgttaatcggaattactgggcgtaaagcgcacgcaggcggtttgttaagtcagatgtgaaatccccgggctcaacctgggaactgcatctgatactggcaagcttgagtctcgtagaggggggtagaattccaggtgtagcggtgaaatgcgtagagatctggaggaataccggtggcgaaggcggccccctggacgaagactgacgctcaggtgcgaaagcgtggggagcaaacaggattagataccctggtagtccacgccgtaaacgatgtcgacttggaggttgtgcccttgaggcgtggcttccggagctaacgcgttaagtcgaccgcctggggagtacggccgcaaggttaaaactcaaatgaattgacgggggcccgcacaagcggtggagcatgtggtttaattcgatgcaacgcgaagaaccttacctggtcttgacatccacggaagttttcagagatgagaatgtgccttcgggaaccgtgagacaggtgctgcatggctgtcgtcagctcgtgttgtgaaatgttgggttaagtcccgcaacgagcgcaacccttatcctttgttgccagcggtccggccgggaactcaaaggagactgccagtgataaactggaggaaggtggggatgacgtcaagtcatcatggcccttacgaccagggctacacacgtgctacaatggcgcatacaaagagaagcgacctcgcgagagcaagcggacctcataaagtgcgtcgtagtccggattggagtctgcaactcgactccatgaagtcggaatcgctagtaatcgtggatcagaatgccacggtgaatacgttcccgggccttgtacacaccgcccgtcacaccatgggagtgggttgcaaaagaagtaggtagcttaaccttcgggagggcgcttaccactttgtgattcatgactggggtgaagtcgtaacaaggtaaccgtaggggaacctgcggttggatcacctccttaccttaaagaagcgtactttgtagtgctcacacagattgtctgatagaaagtgaaaagcaaggcgtttacgcgttgggagtgaggctgaagagaataaggccgttcgctttctattaatgaaagctcaccctacacgaaaatatcacgcaacgcgtgataagcaattttcgtgtccccttcgtctagaggcccaggacaccgccctttcacggcggtaacaggggttcgaatcccctaggggacgccacttgctggtttgtgagtgaaagtcgccgaccttaatatctcaaaactcatcttcgggtgatgtttgagatatttgctctttaaaaatctggatcaagctgaaaattgaaacactgaacaacgaaagttgttcgtgagtctctcaaattttcgcaacacgatgatgaatcgaaagaaacatcttcgggttgtgaggttaagcgactaagcgtacacggtggatgccctggcagtcagaggcgatgaaggacgtgctaatctgcgataagcgtcggtaaggtgatatgaaccgttataaccggcgatttccgaatggggaaacccagtgtgtttcgacacactatcattaactgaatccataggttaatgaggcgaaccgggggaactgaaacatctaagtaccccgaggaaaagaaatcaaccgagattcccccagtagcggcgagcgaacggggagcagcccagagcctgaatcagtatgtgtgttagtggaagcgtctggaaaggcgcgcgatacagggtgacagccccgtacacaaaaatgcacatattgtgagctcgatgagtagggcgggacacgtggtatcctgtctgaatatggggggaccatcctccaaggctaaatactcctgactgaccgatagtgaaccagtaccgtgagggaaaggcgaaaagaaccccggcgaggggagtgaaaaagaacctgaaaccgtgtacgtacaagcagtgggagcacgcttaggcgtgtgactgcgtaccttttgtataatgggtcagcgacttatattctgtagcaaggttaaccgaataggggagccgaagggaaaccgagtcttaactgggcgttaagttgcagggtatagacccgaaacccggtgatctagccatgggcaggttgaaggttgggtaacactaactggaggaccgaaccgactaatgttgaaaaattagcggatgacttgtggctgggggtgaaaggccaatcaaaccgggagatagctggttctccccgaaagctatttaggtagcgcctcgtgaattcatctccgggggtagagcactgtttcggcaagggggtcatcccgacttaccaacccgatgcaaactgcgaataccggagaatgttatcacgggagacacacggcgggtgctaacgtccgtcgtgaagagggaaacaacccagaccgccagctaaggtcccaaagtcatggttaagtgggaaacgatgtgggaaggcccagacagccaggatgttggcttagaagcagccatcatttaaagaaagcgtaatagctcactggtcgagtcggcctgcgcggaagatgtaacggggctaaaccatgcaccgaagctgcggcagcgacgcttatgcgttgttgggtaggggagcgttctgtaagcctgcgaaggtgtgctgtgaggcatgctggaggtatcagaagtgcgaatgctgacataagtaacgataaagcgggtgaaaagcccgctcgccggaagaccaagggttcctgtccaacgttaatcggggcagggtgagtcgacccctaaggcgaggccgaaaggcgtagtcgatgggaaacaggttaatattcctgtacttggtgttactgcgaaggggggacggagaaggctatgttggccgggcgacggttgtcccggtttaagcgtgtaggctggttttccaggcaaatccggaaaatcaaggctgaggcgtgatgacgaggcactacggtgctgaagcaacaaatgccctgcttccaggaaaagcctctaagcatcaggtaacatcaaatcgtaccccaaaccgacacaggtggtcaggtagagaataccaaggcgcttgagagaactcgggtgaaggaactaggcaaaatggtgccgtaacttcgggagaaggcacgctgatatgtaggtgaagcgacttgctcgtggagctgaaatcagtcgaagataccagctggctgcaactgtttattaaaaacacagcactgtgcaaacacgaaagtggacgtatacggtgtgacgcctgcccggtgccggaaggttaattgatggggtcagcgcaagcgaagctcttgatcgaagccccggtaaacggcggccgtaactataacggtcctaaggtagcgaaattccttgtcgggtaagttccgacctgcacgaatggcgtaatgatggccaggctgtctccacccgagactcagtgaaattgaactcgctgtgaagatgcagtgtacccgcggcaagacggaaagaccccgtgaacctttactatagcttgacactgaacattgagccttgatgtgtaggataggtgggaggctttgaagtgtggacgccagtctgcatggagccgaccttgaaataccaccctttaatgtttgatgttctaacgtggacccgtgatccgggttgcggacagtgtctggtgggtagtttgactggggcggtctcctcctaaagagtaacggaggagcacgaaggttggctaatcctggtcggacatcaggaggttagtgcaatggcataagccagcttgactgcgagcgtgacggcgcgagcaggtgcgaaagcaggtcatagtgatccggtggttctgaatggaagggccatcgctcaacggataaaaggtactccggggataacaggctgataccgcccaagagttcatatcgacggcggtgtttggcacctcgatgtcggctcatcacatcctggagctgaagtaggtcccaagggtatggctgttcgccatttaaagtggtacgcgagctgggtttagaacgtcgtgagacagttcggtccctatctgccgtgggcgctggagaactgaggggggctgctcctagtacgagaggaccggagtggacgcatcactggtgttcgggttgtcatgccaatggcactgcccggtagctaaatgcggaagagataagtgctgaaagcatctaagcacgaaacttgccccgagatgagttctccctgactccttgagagtcctgaaggaacgttgaagacgacgacgttgataggccgggtgtgtaagcgcagcgatgcgttgagctaaccggtactaatgaaccgtgaggcttaaccttacaacgccgaagctgttttggcggatgagagaagattttcagcctgatacagattaaatcagaacgcagaagcggtctgataaaacagaatttgcctggcggccgtagcgcggtggtcccacctgaccccatgccgaactcagaagtgaaacgccgtagcgccgatggtagtgtggggtctccccatgcgagagtagggaactgccaggcatcaaattaagcagtaagccggtcataaaaccggtggttgtaaaagaattcggtggagcggtagttcagtcggttagaatacctgcctgtcacgcagggggtcgcgggttcgagtcccgtccgttccgccaccctaattaggggcgtagttcaattggtagagcaccggtctccaaaaccgggtgttgggagttcgagtctctccgcccctgccagaaatcatccttagcgaaagctaaggattttttttatctgaaataaccctctccgaagtaaatccttctaccggcatccttgccagccattcatattaatacacttcatccagcacgttaattttcaaaagatcgcgaatcaacgcatttttatcgctattttgcagccatatggcataaagcggccgactaagtgttgtgctatcgacaacggtatgcaggccgccttttttacgcgcccagctgacgggtagccaggtgcaaccattaagcatcgcaatctgttgctgtgccagttcagcagaactggttgtcagaatgggcacttcgtcagcaccgatcaaacctgcctcatgctgttgaaaatctggcccccactcaagtcgcagataattaagatctccctttagtttactaggggcactggtataaagcgctaaagtgaaatatcccagcaactgactactaaattcgtccattttgggcgcttcagtggtaataagaagatcaagctggcgttcatgcagctgttttaccagagactgccgttgggcaattcgcgcttcgaactgtaagcctgtatgggcatcctgattttgatacaagcgtcccagccactgattaagcatacattcccacaagctggcgctggcaccgatagaaaactcgttatgtcgactggtatgcgccacctccttacgggcggcctgccaggtgctcatgagcgtttctgcataaggcagtagtttttcaccggcagcggttaaacggatattgtttctgtggcgggtgaaaaggttcacacccagttgattttccagttgtctgattcgaaagctcactgcactctgggtcagatagaggctttcagccgctcgaccaaagtgacgcgttcggctaacttccaggaaagtttttaacaattccgtatccacagtgctctccgcaaaattatttgtcgttatgatttaaatgttttgttttacactctgtcaagcgtaactaatactccgcgccataactagctcggtcaaagaattaggagcgtgcaggatggcggaaagctttacgacgactaatcgatatttcgacaataaacattatccacgtggattctctcgtcatggtgatttcaccatcaaagaggcacaactgcttgagcgtcatggttatgccttcaatgagttggatcttggcaaacgcgagccggttaccgaggaagagaaactcttcgtagcagtatgccgtggcgaacgtgagccagtgacagaagcagaacgcgtgtggtccaagtatatgacgcgtattaagcgtccaaaacgttttcacaccctttccggcggtaaaccgcaggttgaaggtgctgaagactacaccgattctgacgattaataaaaagggcgaaatgccctttttttatgtcagtagtttctgcagatggatgagcaaacggtcaatcgctcgatagctaactgcctcctgcaaatgctgacgtgtgataatgtcagactgatcaatatcagcaatggttcgtgcaactttcaataaccgctgccaggcacgaatgcttaaccccagatggatcagtgttccttccaaccacatcgcatcttcgctctcaagtttgcagaattggcgtatttccggactatccagccaggcattcagtttattctgccgcttaaattggcgctctctggcggccattacgcgttgtttaacggtggcgctgctttctcccggcactaccgttttactcaaaatgccggggggtggtaatgggatctccagactgagatcgaagcggtcgagaaagggcccgctgagccggttgagataacgtaatgtctgttctggcgtgcagcggttatggtttccctgataatgtccggtagggctgggattcatcgccgcaacaagctggaaacgggctggataggttatttttgctcgtgtgcgactaagatggatctgcccggattcaatcggctctcgcaaggcatccagtgtacgccgttcaaattcaggtagctcatcaagaaaaagcacgccgttatgcgccaggctaatttcaccgggccctggaattgcgccaccgcctaccatcgcagttaagcttgcactgtgatgaggactgcggaacgggcgctgccgccattgtttttgtacactttcagcatttaccagacttaatatcgcagcactctccagtgcctcttcattgcttaaatctggcaacaggccattaatacggctggcgagcattgttttacctgttcccggcggcccaatcagtaaaaggttgtgcccgccagcagcggtaatttccagtcctcgctttccttgttcctgaccgataacatcactgagatcatgttgtagcgcccgggatactgcatcagttggtttcgggcgttcgagagcgtgcttaccttccagaaacgcacagacagcttgcagatgatcggctatcaggcatccttcaccgttaattagccccacttcatcttcgttatctttcgcgacgataatttttctgccgctcttaatagcttcagttgcactggagattgcgccgggaacgccacgcagagcgcctgtaagcgccagttctccgactaattcatattcatctaacttattggctgtaagctgttcactggccgccagcaacgcaatggcgataggtaaatcatatcgtcccccttcttttggcagatcagctggagccaggttgatggtgatttttttcgccggatattcatatccgctattgataatggcgctgcgcacgcgatcgcgagcttcttttaccgttgtttctggtaagcccaccatcgttaagccgggtagacctttactgatatgtacctcaacagtgatcgggggcgcatttactcccagggctgcgcgggtatgaacaatactcagactcataagccctccttgagtcaccattatgtgcataagatatcgctgctgtagcccgctaattcgtgaattttagtggctgattcctgtttatttgtgcaagtgaagttgagttgttctggcggtggaatgatgctcgcaaaaatgcagcggacaaaggatgaactacgaggaagggaacaacattcatactgaaattgaatttttttcactcactattttatttttaaaaaacaacaatttatattgaaattattaaacgcatcataaaaatcggccaaaaaatatcttgtactatttacaaaacctatggtaactctttaggcattccttcgaacaagatgcaagaaaagacaaaatgacagcccttctacgagtgattagcctggtcgtgattagcgtggtggtgattattatcccaccgtgcggggctgcacttggacgaggaaaggcttaaagatcaagccttaacgaactaagacccccgcaccgaaaggtccgggggttttttttgaccttaaaaacataaccgaggagcagacaatgaataacagcacaaaattctgtttctcaagattcaggacggggaactaactatgaatggcgcacagtgggtggtacatgcgttgcgggcacagggtgtgaacaccgttttcggttatccgggtggcgcaattatgccggtttacgatgcattgtatgacggcggcgtggagcacttgctatgccgacatgagcagggtgcggcaatggcggctatcggttatgctcgtgctaccggcaaaactggcgtatgtatcgccacgtctggtccgggcgcaaccaacctgataaccgggcttgcggacgcactgttagattccatccctgttgttgccatcaccggtcaagtgtccgcaccgtttatcggcactgacgcatttcaggaagtggatgtcctgggattgtcgttagcctgtaccaagcacagctttctggtgcagtcgctggaagagttgccgcgcatcatggctgaagcattcgacgttgcctgctcaggtcgtcctggtccggttctggtcgatatcccaaaagatatccagttagccagcggtgacctggaaccgtggttcaccaccgttgaaaacgaagtgactttcccacatgccgaagttgagcaagcgcgccagatgctggcaaaagcgcaaaaaccgatgctgtacgttggcggtggcgtgggtatggcgcaggcagttccggctttgcgtgaatttctcgctgccacaaaaatgcctgccacctgtacgctgaaagggctgggcgcagtagaagcagattatccgtactatctgggcatgctggggatgcacggcaccaaagcggcaaacttcgcggtgcaggagtgtgacctgctgatcgccgtgggcgcacgttttgatgaccgggtgaccggcaaactgaacaccttcgcgccacacgccagtgttatccatatggatatcgacccggcagaaatgaacaagctgcgtcaggcacatgtggcattacaaggtgatttaaatgctctgttaccagcattacagcagccgttaaatcaatgactggcagcaacactgcgcgcagctgcgtgatgaacattcctggcgttacgaccatcccggtgacgctatctacgcgccgttgttgttaaaacaactgtcggatcgtaaacctgcggattgcgtcgtgaccacagatgtggggcagcaccagatgtgggctgcgcagcacatcgcccacactcgcccggaaaatttcatcacctccagcggtttaggtaccatgggttttggtttaccggcggcggttggcgcacaagtcgcgcgaccgaacgataccgttgtctgtatctccggtgacggctctttcatgatgaatgtgcaagagctgggcaccgtaaaacgcaagcagttaccgttgaaaatcgtcttactcgataaccaacggttagggatggttcgacaatggcagcaactgttttttcaggaacgatacagcgaaaccacccttactgataaccccgatttcctcatgttagccagcgccttcggcatccatggccaacacatcacccggaaagaccaggttgaagcggcactcgacaccatgctgaacagtgatgggccatacctgcttcatgtctcaatcgacgaacttgagaacgtctggccgctggtgccgcctggcgccagtaattcagaaatgttggagaaattatcatgatgcaacatcaggtcaatgtaagcgctcgcttcaatccagaaaccttagaacgtgttttacgcgtggtgcgtcatcgtggtttccacgtctgcagtatgaatatggccgccgccagcgatgcacaaaatataaatatcgaattgaccgttgccagcccacggagcgtcgacttactgtttagtcagttaaataaactggtggacgtcgcacacgttgccatctgccagagcacaaccacaagtcaacaaatccgcgcctgagcgcaaaaggaatataaaaatgaccacgaagaaagctgattacatttggttcaatggggagatggttcgctgggaagacgcgaaggtgcatgtgatgagccacgcgctgcactatggcactagcgtttttgaaggcatccgttgctacgacagccacaaaggaccggttgtattccgccatcgtgagcatatgcagcgtctgcatgactccgccaaaatctatcgcttcccggttagccagagcattgatgagctgatggaagcttgtcgtgacgtgatccgcaaaaacaatctcaccagcgcctatatccgtccgctgatcttcgtcggtgatgttggcatgggagtaaacccgccagcgggatacagtaccgacgtgattatcgctgctttcccgtggggagcgtatctgggcgcagaagcgctggagcaggggatcgatgcgatggtttcctcctggaaccgcgcagcaccaaacaccatcccgacggcggcaaaagccggtggtaactacctctcttccctgctggtgggtagcgaagcgcgccgccacggttatcaggaaggtatcgcgctggatgtgaacggttatatctctgaaggcgcaggcgaaaacctgtttgaagtgaaagatggtgtgctgttcaccccaccgttcacctcctccgcgctgccgggtattacccgtgatgccatcatcaaactggcgaaagagctgggaattgaagtacgtgagcaggtgctgagccgcgaatccctgtacctggcggatgaagtgtttatgtccggtacggcggcagaaatcacgccagtgcgcagcgtagacggtattcaggttggcgaaggccgttgtggcccggttaccaaacgcattcagcaagccttcttcggcctcttcactggcgaaaccgaagataaatggggctggttagatcaagttaatcaataaatacaaaaaatgggacggcacgcaccgtcccatttacgagacagacactgggagtaaataaagtatgcctaagtaccgttccgccaccaccactcatggtcgtaatatggcgggtgctcgtgcgctgtggcgcgccaccggaatgaccgacgccgatttcggtaagccgattatcgcggttgtgaacagcttcacccaatttgtaccgggtcacgtccatctgcgcgatctcggtaaactggtcgccgaacaaattgaagcggctggcggcgttgccaaagagttcaacaccattgcggtggatgatgggattgccatgggccacggggggatgctttatagtctgccatctcgcgaactgatcgctgattccgttgagtatatggtcaacgcccactgcgccgacgccatggtctgcatctctaactgcgacaaaatcaccccggggatgctgatggcttccctgcgcctgaatattccggtgatctttgtttccggcggcccgatggaggccgggaaaaccaaactttccgatcagatcatcaagctcgatctggttgatgcgatgatccagggcgcagacccgaaagtatctgactcccagagcgatcaggttgaacgttccgcgtgtccgacctgcggttcctgctccgggatgtttaccgctaacagtatgaactgcctgaccgaagcgctgggcctgagccagccgggcaacggcagcctgctggcaacccacgccgaccgtaagcagctgttccttaatgctggtaaacgcattgttgaattgaccaaacgttattacgagcaaaacgacgaaagtgcactgccgcgtaatatcgccagtaaggcggcgtttgaaaacgccatgacgctggatatcgcgatgggtggaagcactaacaccgtacttcacctgctggcggcggcgcaggaagcggaaatcgacttcaccatgagtgatatcgataagctttcccgcaaggttccacagctgtgtaaagttgcgccgagcacccagaaataccatatggaagatgttcaccgtgctggtggtgttatcggtattctcggcgaactggatcgcgcggggttactgaaccgtgatgtgaaaaacgtacttggcctgacgttgccgcaaacgctggaacaatacgacgttatgctgacccaggatgacgcggtaaaaaatatgttccgcgcaggtcctgcaggcattcgtaccacacaggcattcagccaagattgccgttgggatacgctggacgacgatcgcgccaatggctgtatccgcagcctggaacacgcctacagcaaagacggcggcctggcggtgctctacggtaactttgcggaaaacggctgcatcgtgaaaacggcaggcgtcgatgacagcatcctcaaattcaccggcccggcgaaagtgtacgaaagccaggacgatgcggtagaagcgattctcggcggtaaagttgtcgccggagatgtggtagtaattcgctatgaaggcccgaaaggcggtccggggatgcaggaaatgctctacccaaccagcttcctgaaaagtatgggtctcggcaaagcctgtgcgctgatcaccgacggtcgtttctctggtggcacctctggtctttccatcggccacgtcagtccggaagcggcaagcggcggcagcattggcctgattgaagatggtgacctgatcgctatcgacatcccgaaccgtggcattcagttacaggtaagcgatgccgaactggcggcgcgtcgtgaagcgcaggacgctcgaggtgacaaagcctggacgccgaaaaatcgtgaacgtcaggtctcctttgccctgcgtgcttatgccagcctggcaaccagcgccgacaaaggcgcggtgcgcgataaaagcaaactggggggttaataatggctgacagccaacccctgtccggtgctccggaaggtgccgaatatttaagagcagtgctgcgcgcgccggtttacgaggcggcgcaggttacgccgctacaaaaaatggaaaaactgagcagccgtcttgataacgtcattctggtgaagcgcgaagatcgccagccagtgcacagctttaagctgcgcggcgcatacgccatgatggcgggcctgacggaagaacagaaagcgcacggcgtgatcactgcttctgcgggtaaccacgcgcagggcgtcgcgttttcttctgcgcggttaggcgtgaaggccctgatcgttatgccaaccgccaccgccgacatcaaagtcgacgcggtgcgcggcttcggcggcgaagtgctgctccacggcgcgaactttgatgaagcgaaagccaaagcgatcgaactgagtcagcagcaggggttcacctgggtgccgccgttcgaccatccgatggtgattgccgggcaaggcacgctggcgctggaactgctccagcaggacgcccatctcgaccgcgtatttgtgccagtcggcggcggcggtctggctgctggcgtggcggtgctgatcaaacaactgatgccgcaaatcaaagtgatcgccgtagaagcggaagactccgcctgcctgaaagcagcgctggatgcgggtcatccggttgatctgccgcgcgtagggctatttgctgaaggcgtagcggtaaaacgcatcggtgacgaaaccttccgtttatgccaggagtatctcgacgacatcatcaccgtcgatagcgatgcgatctgtgcggcgatgaaggatttattcgaagatgtgcgcgcggtggcggaaccctctggcgcgctggcgctggcgggaatgaaaaaatatatcgccctgcacaacattcgcggcgaacggctggcgcatattctttccggtgccaacgtgaacttccacggcctgcgctacgtcagtgaacgctgcgaactgggcgaacagcgtgaagcgttgttggcggtgaccattccggaagaaaaaggcagcttcctcaaattctgccaactgcttggcgggcgtagcgtcaccgagttcaactaccgttttgccgatgccaaaaacgcctgcatctttgtcggtgtgcgcctgagccgcggcctcgaagagcgcaaagaaattttgcagatgctcaacgacggcggctacagcgtggttgatctctccgacgacgaaatggcgaagctacacgtgcgctatatggtcggcggacgtccaagccatccgttgcaggaacgcctctacagcttcgaattcccggaaagtccgggcgcgctgctgcgcttcctcaacacgctgggtacgtactggaacatttctttgttccactatcgcagccatggcaccgactacgggcgcgtactggcggcgttcgaacttggcgaccatgaaccggatttcgaaacccggctgaatgagctgggctacgattgccacgacgaaaccaataacccggcgttcaggttctttttggcgggttaaggaaaaatgcctgatagcgcttcgcttatcaggcctacccgcgcgacaacgtcatttgtggttcggcaaaatcttccagaatgcctcaattagcggctcatgtagccgctttttctgcgcacacacgcccagctcaaacggcgttttctcatcgctgcgctctaaaatcatcacgcggttacgcaccggttcggggctgttttccagcaccacttccggcaacaatgccacgccacagccgagtgccaccatgcttaccatcgcttcatgcccgccaaccgtggcgtaaatcatcgggttactgattttattgcgtcgaaaccacagttcaatgcggcggcgtaccggcccctgatcggccataataaacggcaccgtactccagtccggcttctctacgctcacctgattacgcaccgggcagggcagcgcgggggcaatcagcactactgccagattctccagcatgctaaacgccactgcgccgggcaaggtttccggtttacccgcaatcgccagatccgcttcaccagtgaccaccttttccatcgcatctgccgcatcaccagtagtaagtttaatctccacgctcgggtgttccgcgcggaagcgatccagaatcggcggcagatggctgtaggcagcggtcacgctgcagaagatatgtaattcgccagagaggctcggcccttgctgatcgatggtgtggcgcaactgctgatactgcaacagcgtttgctgggcgaaaacgcgcagctcttcgcccgcttcagtcagcgtcaccgtgcggttatcgcgcacaaacagcggctgaccgagatcttcttccaggcgctgaatctgccgactgagcgtggatgggctaacgtgcatcgcccgcgcgctgcggccaaaatggcggctttccgccagatgcaggaaggttttcagatcgcgtaaatccacagggacagccctcgatgttgacgttgcaaaaattgcaatgtgacgttgtgaatatatcaatttccgcaataaatttcctgtcatatagtgaattcaatctcgcaaacgcgaaccgaacaataagaagcacaacatcacgaggaatcaccatggctaactacttcaatacactgaatctgcgccagcagctggcacagctgggcaaatgtcgctttatgggccgcgatgaattcgccgatggcgcgagctaccttcagggtaaaaaagtagtcatcgtcggctgtggcgcacagggtctgaaccagggcctgaacatgcgtgattctggtctcgatatctcctacgctctgcgtaaagaagcgattgccgagaagcgcgcgtcctggcgtaaagcgaccgaaaatggttttaaagtgggtacttacgaagaactgatcccacaggcggatctggtgattaacctgacgccggacaagcagcactctgatgtagtgcgcaccgtacagccactgatgaaagacggcgcggcgctgggctacagccacggtttcaacatcgtcgaagtgggcgagcagatccgtaaagatatcaccgtagtgatggttgcgccgaaatgcccaggcaccgaagtgcgtgaagagtacaaacgtgggttcggcgtaccgacgctgattgccgttcacccggaaaacgatccgaaaggcgaaggcatggcgattgccaaagcctgggcggctgcaaccggtggtcaccgtgcgggtgtgctggaaagctccttcgttgcggaagtgaaatctgacctgatgggcgagcaaaccatcctgtgcggtatgttgcaggctggctctctgctgtgcttcgacaagctggtggaagaaggtaccgatccagcatacgcagaaaaactgattcagttcggttgggaaaccatcaccgaagcactgaaacagggcggcatcaccctgatgatggaccgtctctctaacccggcgaaactgcgtgcttatgcgctttctgaacagctgaaagagatcatggcacccctgttccagaaacatatggacgacatcatctccggcgaattctcttccggtatgatggcggactgggccaacgatgataagaaactgctgacctggcgtgaagagaccggcaaaaccgcgtttgaaaccgcgccgcagtatgaaggcaaaatcggcgagcaggagtacttcgataaaggcgtactgatgattgcgatggtgaaagcgggcgttgaactggcgttcgaaaccatggtcgattccggcatcattgaagagtctgcatattatgaaagtctgcacgagctgccgctgattgccaacaccatcgcccgtaagcgtctgtacgaaatgaacgtggttatctctgataccgctgagtacggtaactatctgttctcttacgcttgtgtgccgttgctgaaaccgtttatggcagagctgcaaccgggcgacctgggtaaagctattccggaaggcgcggtagataacgggcaactgcgtgatgtgaacgaagcgattcgcagccatgcgattgagcaggtaggtaagaaactgcgcggctatatgacagatatgaaacgtattgctgttgcgggttaagtgcgcgctgatgccctcaccccgaccctctcccacagggagagggagaaaacactcaaggccttctcctggagaaggccttgctattagttgcggtacagcaccttaatgatgtgatatccgaactgggtgtgcagcgggccggtcggctccagtaccggacaagagaaaaccactttatcgaacgccggaaccatctgaccctggcggaattcacctaaatcaccgccgcgtttgccacttgggcaaatggagtgtttcttcgccagcttgccgaaatcggccccgttcttaatctgctcgagaagatccagagccagtttctcttcttttacaaggatatgcagtgctgctgctgtttttgccatgatcgtgccttgagtgaataattgtcaggcggcgattttagcatgatccgcagatgctaacgtaattgtcagtcagggagtggctggtacatatatggcaaaagcccggaaaatccgggcttcgcaggtccctcaaggggagaaaacttagggcctctatgggctacaaagtcattatcggggatggttattttattgtcaatttatgaggcttatggcattgatactcttgatgaccgccctctgtatgtctgcaaccaactcatgtggcaaacattgattaagataccctctgtaagtccttgctctgtttaatctgtttcgactgacttgttgtaccaggtcggctttggcccaacgaatctgctgatcaaagaattgcaggtcattgataacattactggctatttcaacatgcattccacgttttaacttgtctggtcggctgtggttgataatggaacgacgatgcatgcgttgccattaatttttccgttgagcacgacaactaacctgttttttatcatttcaggaggaatgcggccatcgtaatacgtcgtgctgaacggtccattttggctaacaggatagttaccaaagttgcattccagtatttcaccaaccttagggctgaaattaatcgccacgagtaaacctctccttagtaaactctgaaaaagtaataacacaacgttacgacccgatattttctaagtctaatggattcacgatgaactccgatttcggtcttctctctctgatttaaacatccgcagccaaccggttagcggcttacacgcggtcacattcaaatgcgattctgctacaatcctccccccgttcgaagattgagcaatacacctatgcgtctaaaccccggccaacaacaagctgtcgaattcgttaccggcccctgcctggtgctggcgggcgcgggttccggtaaaactcgtgttatcaccaataaaatcgcccatctgatccgcggttgcggttatcaggcgcggcacattgcggcggtgacctttactaataaagcagcgcgcgagatgaaagagcgtgtagggcagacgctggggcgcaaagaggcgcgtgggctgatgatctccactttccatacgttggggctggatatcatcaaacgcgagtatgcggcgcttgggatgaaagcgaacttcagcttgtttgacgataccgatcagcttgctttgcttaaagagttgaccgaggggctgattgaagatgacaaagttctcctgcaacaactgattagcaccatctctaactggaagaatgatctcaaaacaccgtcccaggcggcagcaagtgcgattggcgagcgggaccgtatttttgcccattgttatgggctgtatgatgcacacctgaaagcctgtaacgttctcgacttcgatgatctgattttattgccgacgttgctgctgcaacgcaatgaagaagtccgcaagcgctggcagaacaaaattcgctatctgctggtggatgagtatcaggacaccaacaccagccagtatgagctggtgaaactgctggtgggcagccgcgcgcgctttaccgtggtgggtgacgatgaccagagcatctactcctggcgcggtgcacgtccgcaaaacctggtgctgctgagtcaggattttccggcgctgaaggtgattaagcttgagcagaactatcgctcttccgggcgtattctgaaagcggcgaacatcctgatcgccaataacccgcacgtctttgaaaagcgtctgttctccgaactgggttatggcgcggagctaaaagtattaagcgcgaataacgaagaacatgaggctgagcgcgttactggcgagctgatcgcccatcacttcgtcaataaaacgcagtacaaagattacgccattctttatcgcggtaaccatcagagccgggtgtttgaaaaattcctgatgcaaaaccgcatcccgtacaaaatatctggtggtacgagctttttctctcgtcctgaaatcaaggacttgctggcttatctgcgcgtgctgactaacccggacgatgacagcgcatttctgcgtatcgttaacacgccgaagcgagagattggcccggctacgctgaaaaagctgggtgagtgggcgatgacgcgcaataaaagcatgtttaccgccagctttgatatgggcctgagtcagacgcttagcggacgtggttatgaagcattgacccgcttcactcactggttggcagaaatccagcgtctggcggagcgggagccgattgccgcggtgcgtgatctgatccatggcatggattatgaatcctggctgtacgaaacaagccccagcccgaaagccgccgaaatgcgcatgaagaacgtcaaccaactgtttagctggatgacggagatgctggaaggcagtgaactggatgagccgatgacgctcacccaggtggtgacgcgctttactttgcgcgacatgatggagcgtggtgagagtgaagaagagctggatcaggtgcaactgatgactctccacgcgagcaaagggctggagtttccttatgtctacatggtcggtatggaagaagggtttttgccgcaccagagcagcatcgatgaagataatatcgatgaggagcggcggctggcctatgtcggcattacccgcgcccagaaggaattgacctttacgctgtgtaaagaacgccgtcagtacggcgaactggtgcgcccggagccgagccgctttttgctggagctgccgcaggatgatctgatttgggaacaggagcgcaaagtggtcagcgccgaagaacggatgcagaaagggcaaagccatctggcgaatctgaaagcgatgatggcggcaaaacgagggaaataatcaaggccggaaaagatgcgtcagcatcgcatccggcacttactcattaatgcacttccagcggccagtggacatagctctgccactggctttcctgagcaataatctctttacccagcggatgttgggttagccaaccttgcggaagcgtcaaggtcaacagttcatggttagcctgtaatgtcatctctggcacgagatcgtcacggcgacggctggcaaaaatgatggccaggcgtagtaaacggcagagttgttctgcgacgcgcggcggtacggcattttgctgatgcaggctactgagatcgaccggattagtctggttgagcagtagcgtcgccagcaattttttctgtgcgggggtaaaaccgggaagatccagattacgcaccagataagcagcgtgttgcggcgcttgtttgaagtcaacgctcaggccgatttcatgaagctgacaggcgctgatgagcaaatcgcggcttattgcttcaagatgccattcgttttccacctgatcgaagaagttagccgcaactttggctacgcgctgtgcctgatcaatatcgatcataaagcggcgttgaatattacgcagcgtacggctgcgaatatcctgctcgacggccagatgcaacatgccgtagaccaggccttcacgcagcgcaccgcccgccagggtcatacactgaatattcagttcggtaaaaatggcgatcaggatcgccagaccactcgggaacactaacgcacgttccagcgtcagcccgtcaatctccagttcctccagccgaccgcaatgaatggctcgctgtttcaattgctgcaacttttccagggtaatgcgttcatccatcccctgtgccatcatgatttcctgtaacgcctgcacggtgccggaagcaccaacgcacactttccagccgtgataccgtaattcatcggcaaccggacgtaacacttcgcgtgccgctttttctgcagcatcaaaattttcctgccccagattacgatcggcaaaatagcgttccagccaggtgacgcagcccatgctcaggctgaacaagctggtggtttgtgcacccgtgccggttaccagttcagtactggctccgcctatatccaccaccaggcgctgatcggcaccaccagtggtgtgagcaacgccctgataaatcagacgtgcttcctcttcaccgctgatcacctgtaccggacaaccgagaatttcctgcgctttggcaataaaatcacccgcattgacggcaaggcgtaacgtcgccgtagcgacaacgcgaatttggctgggaggaatatcttgcagacgttcagcaaacaggcgcaaacattgccaaccgcgctccattgcttcattggagagggcattttcgctattcaggccagcagccagacgcactttgcgttttattcgcgtcagcgtctggatgcttccagccacctcgcgcacaaccagcatatgaaaactattgctaccgagatcaatggctgcatacaggctgctggtggaacccatactcttcatccttcaatctgtctctgtgttggctgcattctttcacctgaatcacttactacagtaagctcatcgggattcattctcttgccatcttgatacagtttgaatgattttgagtatgacattttttatttaaccactacgacgacgattacgcggagcgccagtacgacgcggaccattgcctgtgcgcgggcgcgtgaggcgcagcggttttggcagatcggtcatcaatgcgtccggattgtatttgcttaccggaatactgtgaccaatataggtctcaatagcaggcaaattcaatgcatactcttcacacgccaggctgatagagtgaccgcttgcgcctgcgcgacctgtacgaccaatacggtgaacgtaatcttcacagtcatcgggtaaatcgtagttaaagacgtgcgtcactgccggaatatgcaaaccacgcgcggcaacgtcggtggcaaccagaatatccagatcgccacgggtaaattcatcaagaatacgcagacgttttttctgcgcgacatcgcctgtcaataaaccgacacgatgaccatctgctgccaggtggccccagatctcttcacaacggtgtttggtgttggcgaaaataatcgctctgtctggccactcttcttcgatcagcgtttgcagcaaacgcattttttcttcgttagaagggtagaaaagctcttctttaatacggtggcccgttttctgttccggttccacttcaatatattcggcattgttcatctgctcgaacgccagttcacgtacccggtagctaagcgtggcggagaacagcatgttgaggcgctggtttgcaggcggcatacggcggaacagccagcggatatctttaataaagcccagatcgtacatgcgatcggcttcgtccagtaccaccacctgaatggcaccgaggttaatgtggttctgcttggcgtagtcaattaaacgccccgtggtgccaatcagaatgtcaacgccgctttccagcactttcagctgtttgtcgtagccatcaccaccgtaagccagacccagcttcaggccagtagcttccgccagcggttctgcgtcggcatggatctgcacggcaagttcacgcgtcggtgccataattaaggcacgcggctgattcaccttgcgatcggcaatcgcaggatgagagagaagataatgaaacgtactcgtaagaaacgccatcgttttcccggtaccggtttgcgcctgcccggctacgtcacgacccgccagcgtcagcggaagggccagtgcctgaatgggcgtacagttatgaaacccttttttttcaagggcttctacaaccttcggatgcagggcgaagtcggaaaacttctgttctgttaaatgtgttttgctcatagtgtggtagaatatcagcttactattgctttacgaaagcgtatccggtgaaataaagtcaacctttagttggttaatgttacaccaacaacgaaaccaacacgccaggcttattcctgtggagttatatatgagcgataaaattattcacctgactgacgacagttttgacacggatgtactcaaagcggacggggcgatcctcgtcgatttctgggcagagtggtgcggtccgtgcaaaatgatcgccccgattctggatgaaatcgctgacgaatatcagggcaaactgaccgttgcaaaactgaacatcgatcaaaaccctggcactgcgccgaaatatggcatccgtggtatcccgactctgctgctgttcaaaaacggtgaagtggcggcaaccaaagtgggtgcactgtctaaaggtcagttgaaagagttcctcgacgctaacctggcgtaagggaatttcatgttcgggtgccccgtcgctaaaaactggacgcccggcgtgagtcatgctaacttagtgttgacttcgtattaaacataccttattaagtttgaatcttgtaatttccaacgcttcccgttttatcttaaatgcgaagtgaacagatttctggcagcagtctcaatccgtcttgtcgtttcagttctgcgtactctcctgtgaccaggcagcgaaaagacatgagtcgatgaccgtaaacaggcatggatgatcctgccataccattcacaacattaagttcgagatttaccccaagtttaagaactcacaccactatgaatcttaccgaattaaagaatacgccggtttctgagctgatcactctcggcgaaaatatggggctggaaaacctggctcgtatgcgtaagcaggacattatttttgccatcctgaagcagcacgcaaagagtggcgaagatatctttggtgatggcgtactggagatattgcaggatggatttggtttcctccgttccgcagacagctcctacctcgccggtcctgatgacatctacgtttcccctagccaaatccgccgtttcaacctccgcactggtgataccatctctggtaagattcgcccgccgaaagaaggtgaacgctattttgcgctgctgaaagttaacgaagttaacttcgacaaacctgaaaacgcccgcaacaaaatcctctttgagaacttaaccccgctgcacgcaaactctcgtctgcgtatggaacgtggtaacggttctactgaagatttaactgctcgcgtactggatctggcaagtcctatcggtcgtggtcagcgtggtctgattgtggcaccgccgaaagccggtaaaaccatgctgctgcagaacattgctcagagcattgcttacaaccacccggattgtgtgctgatggttctgctgatcgacgaacgtccggaagaagtaaccgagatgcagcgtctggtaaaaggtgaagttgttgcttctacctttgacgaacccgcatctcgccacgttcaggttgcggaaatggtgatcgagaaggccaaacgcctggttgagcacaagaaagacgttatcattctgctcgactccatcactcgtctggcgcgcgcttacaacaccgttgttccggcgagtggtaaagtgttgaccggtggtgtggatgccaacgccctgcatcgtccgaaacgcttctttggtgcggcgcgtaacgtggaagagggcggcagcctgaccattatcgcgacggcgcttatcgataccggttctaaaatggacgaagttatctacgaagagtttaaaggtacaggcaacatggaactgcacctctctcgtaagatcgctgaaaaacgcgtcttcccggctatcgactacaaccgttctggtacccgtaaagaagagctgctcacgactcaggaagaactgcagaaaatgtggatcctgcgcaaaatcattcacccgatgggcgaaatcgatgcaatggaattcctcattaataaactggcaatgaccaagaccaatgacgatttcttcgaaatgatgaaacgcagttaaatttgtcttatgccaaaaacgccacgtgtttacgtggcgttttgcttttatatctgtaatcttaatgccgcgctggcgatgttaggaaaattcctggaatttgctggcatgttatgcaatttgcatatcaaatggttaatttttgcacaggactggtgggtttggaacggactttcccttctgaataaaggtcttcgtggttatacttctgctaataattttctctgagagcatgcattgtgaatttactgacagtgagtactgatctcatcagtatttttttattcacgacactgtttctgttttttgcccgtaaggtggcaaaaaaagtcggtttagtggataaaccaaacttccgcaaacgtcaccagggattgatacctctcgttggggggattagcgtttacgcagggatttgcttcacgttcggaattgtcgattactatattccgcatgcatctctctatctcgcttgtgccggtgtgcttgttttcattggcgcgctggatgaccgttttgatatcagcgtaaaaatccgtgccaccatacaggccgctgttggcattgttatgatggtgttcggcaagctttatctcagtagcctgggttatatctttggctcctgggagatggtgctcggaccgtttggttacttcctgacgctatttgccgtctgggcggccattaatgcgttcaacatggttgatggcattgatggcttgctgggcgggttgtcctgcgtcagctttgcagcaatcggtatgattttgtggttcgacgggcaaaccagcctcgcaatctggtgctttgcgatgatcgccgccatcctgccatacatcatgcttaaccttggtatcctgggtcgccgctacaaagtctttatgggtgatgcgggcagtacgctgattggttttaccgttatctggatcctgctcgaaacgacccagggcaaaacccatcccatcagcccggttaccgctttgtggataatcgccattccgctaatggatatggtggcgattatgtaccgtcgcctgcgtaaaggcatgagcccattctctcctgaccgtcagcatattcaccatttgatcatgcgtgccgggtttacttcccgtcaggcgtttgtgctgattacccttgccgcagcactgctcgcttccattggcgtgctggcagaatattctcattttgtcccggagtgggtcatgctggtgctctttttgctagcattcttcctctatggatattgcattaagcgtgcctggaaagttgctcgctttattaagcgcgtaaaacgcagactgcgtagaaatcgtggtggcagccccaatttaaccaaataaatgaggatgtgatgacacaaccaatgcctgggaaaccggccgaagacgctgaaaatgaactggatattcgtgggttgtttcgtaccttgtgggctgggaagctatggattattggcatggggctggcgtttgcgttaatcgcgctggcgtatacgttttttgctcgtcaggagtggagcagcacggcgattaccgatcgtccaacggtgaatatgctggggggatattacagccagcagcaatttttgcgtaacctggatgtccgtagtaacatggcttctgccgaccaaccaagcgtcatggacgaagcctataaagagtttgttatgcaactggccagctgggatacccgcagagagttctggctgcaaaccgactattacaaacagcggatggtgggcaacagcaaagccgatgcggcgttgctggatgaaatgattaacaacatccagtttatccccggagactttacccgcgcggtcaatgacagcgtgaagcttattgccgaaaccgcgcctgacgctaataacctgttacgtcagtatgttgcttttgccagccagcgtgcagccagccatctgaatgatgagctgaaaggcgcatgggcggcgcgtaccatccagatgaaagctcaggtgaagcgtcaggaagaggtggcgaaagccatctacgaccgccggatgaacagcattgagcaggcgctgaaaattgctgagcagcataatattagccgcagtgcgacagatgtacctgccgaggaattacctgatagtgaaatgttcctgcttgggcgtccaatgcttcaggctcgactggaaaatttacaggccgtcggtccggcctttgatctcgactatgatcagaatcgggccatgttaaacaccctgaatgttggtccaaccctggatccgcgttttcagacctatcgctatttgcgtacgccggaagaaccggtaaaacgcgatagcccacgtcgtgccttcctgatgattatgtggggcattgtcggggggctgatcggggctggtgtcgcattaacccgccgttgcagcaaataacaacactgctgcggtgagcgcaaaggcgctcgccgcttattcgaagagaatcgatgtgaaagtactgactgtatttggtacgcgcccggaagccatcaagatggcgccgttggtgcatgcgttggcaaaagatcctttttttgaggctaaagtttgcgtcactgcgcagcatcgggagatgctcgatcaggtgctgaaactcttttccattgtacctgactacgatctcaacataatgcagccaggacagggcctgacagagataacctgtcggattctggaagggctaaaacctattcttgccgagttcaaaccagacgtcgtgctggttcacggcgatacgacgacgacgctggcaaccagcctggcggcgttttatcagcgtattcctgttggtcacgttgaggctggtctgcgcacgggcgatctctatagcccgtggccggaagaggctaaccgtacattgaccgggcatctggcgatgtatcacttctctccaaccgaaacttcccggcaaaacttgctgcgtgaaaacgttgcggatagccgaatcttcattaccggtaatacagtcattgatgcactgttatgggtgcgtgaccaggtgatgagcagcgacaagctgcgtagtgaactggcggcaaattacccgtttatcgaccccgataaaaagatgattctggtgaccggtcacaggcgtgagagtttcggtcgtggctttgaagaaatctgccacgcgctggcagacatcgccaccacgcaccaggacatccagattgtctatccggtgcatctcaacccgaacgtcagagaaccggtcaatcgcattctggggcatgtgaaaaatgtcattctgatcgatccccaggagtatttaccgtttgtctggctgatgaaccacgcctggctgattttgaccgacagtggcggcattcaggaagaagcgcctagcctggggaaacctgtgctggtgatgcgcgataccactgagcgtccggaagcggtgacggcgggtacggtgcgtctggtaggcacggataagcagcgaattgtcgaggaagtgacgcgtcttttaaaagacgaaaacgaatatcaagctatgagccgcgcccataacccgtatggtgatggtcaggcatgctctcgcattctggaagcgttaaaaaataatcggataagtctatgagttttgcgaccatttctgttatcggactgggttatatcgggctgccaacggcagcagcgtttgccagtcggcaaaaacaggtaattggtgtcgatatcaaccaacatgcggttgataccatcaatcgtggcgaaatccatatcgtcgaacctgatttggcgagtgtagtaaaaactgccgtagaaggcggttttttacgagcgagcacgacgccagttgaagcggatgcctggctgattgctgtacccacgccgtttaagggcgatcatgagccagatatgacctacgttgaaagcgctgctcgctccattgcgccagtgctgaaaaaaggcgcgctggtgatccttgaatccaccagcccggtggggagtaccgagaagatggcagaatggttagcagagatgcgtccggatctcactttcccgcagcaggtgggcgagcaggcggacgtcaacattgcttactgcccggaacgcgtgttaccaggacaggtaatggtcgagctgattaaaaacgatcgcgtgattggtggtatgacgccggtttgtagcgcccgcgccagcgaactgtacaaaattttcctcgaaggtgagtgtgtcgtcactaacagccggacggcggaaatgtgtaagctcaccgaaaacagcttccgcgatgtgaatatcgcttttgctaatgaattgagcctgatttgtgccgatcaggggattaacgtctgggaactgattcgcctggcgaatcgtcaccctcgcgttaatattcttcagcctggccctggcgtgggcggtcactgcattgctgttgatccgtggtttatcgtggcacagaacccccagcaggcgcggcttatccgtaccgcgcgcgaagtgaacgatcacaaaccgttctgggttatcgatcaggtgaaagcggcggtggctgattgcctggcggctaccgataaacgcgccagtgaactgaaaatcgcctgctttggtctggcgtttaaaccgaatattgatgacctgcgcgaaagcccggcgatggaaatcgctgaactgatcgcccagtggcatagcggcgaaactctggttgttgagcctaacatccaccagttgccgaaaaaactgaccgggctttgtactctggcgcagcttgacgaggcgctggcaacggcagacgtgctggtgatgctggtcgatcatagtcagttcaaagttatcaatggcgacaatgtccatcagcagtatgtcgtcgatgccaaaggagtctggcgctgatgagaaaaattctgataacaggtggtgccgggtttattggcagcgcgctggtgcgttatatcatcaacgaaacgagcgacgcggtggtagtggtcgataagctgacctacgccggaaacctgatgagcctggcaccggtcgcgcaaagcgagcgctttgcctttgagaaagttgatatctgcgatcgggcagaactggcacgcgtattcactgagcatcagccagactgtgtcatgcatctggcagccgaaagccatgttgaccgttctattgacggcccggcagcgtttattgaaaccaacattgtcgggacttatacattgcttgaagcggcgcgggcttactggaatgcgctgacggaagataaaaaaagtgcgttccgttttcatcatatctccactgacgaagtatatggtgacctgcacagcacggatgatttcttcaccgaaaccacgccgtatgcgccgagcagcccttattccgcgagtaaagccagcagcgaccatctggtgcgcgcctggctgcggacctatggtctgccgacgcttatcaccaactgcagcaataactacggcccttaccactttccggaaaaactgatcccgctgatgatcctcaacgcgctggcgggtaaaagcctgccggtatatggcaacgggcagcaaatccgtgactggctgtatgtggaagatcacgcccgcgcgctgtattgcgtggcgaccaccgggaaagtcggtgaaacctataatattggtggtcacaacgagcgtaagaatctcgatgttgtggaaaccatttgcgagctgctggaagaactggctccgaacaagccgcacggcgtggcgcactatcgtgacctgatcacctttgtcgctgaccgtccggggcatgatctgcgttatgccattgatgctagcaaaattgcccgtgaacttggctggctgccgcaggaaacctttgaaagtggaatgcgtaaaacggttcagtggtatctggctaatgaaagctggtggaagcaggtgcaggacggcagctatcagggcgagcgtttaggtctgaaaggctaattttcagcggaggcaaacatgaaaggtattatcctggcgggcggttccggcacccgattgcatccgattacgcgcggcgtaagcaagcaactgttgccgatttacgataagccaatgatttactatccgctgagcgtgctgatgctggccggtatccgcgaaattctcatcatcactacgccggaagataaaggttatttccagcgcctgctgggcgatggtagtgagttcggtatccagctggaatatgccgaacagcccagcccggacggtctggcgcaggcctttatcatcggtgaaaccttccttaatggtgaaccttcttgtctggtgctgggcgataacatcttcttcggtcagggcttcagtccgaagctgcgtcatgttgcggcgcgcaccgaaggggcgacggtttttggctatcaggtgatggacccggaacgctttggcgtggtggagtttgacgacaatttccgcgctatcagcctggaagaaaagccaaaacagccgaagagtaactgggcggtgaccgggctttatttctacgacagtaaagtcgtggagtacgcaaagcaggtgaagccgagcgagcgtggtgaactggagattacctccatcaaccagatgtacctcgaggcgggcaacctgaccgttgaactgctcgggcgcggatttgcctggctggataccggcactcacgacagcctgattgaagccagcacctttgtacagacggtggaaaaacgccagggctttaagattgcctgcctggaagagattgcctggcgtaacggctggctcgatgacgagggtgtgaagcgtgctgccagtagtttagcgaaaactggctacggccaatatctgctggagttacttcgtgcccgtccgcgccagtattgagccactaacctgggaaaacgccttctttggtgttaacagcgccatcgtgcgcattacgtctgaagcaccgctcctgacgccagacgcgttagcgccgtggtcacgggtgcaggccaaaattgcggcaagtaatacgggtgaactggatgccctgcaacagctgggattctccctggtagaaggtgaagttgatttggcgctacccgtgaacaatgccagtgatagcggtgctgtagtggcacaagagaccgatattcccgcattacgtcagttagccagcgccgcatttgcgcaaagccgttttcgtgcgccgtggtatgcgcctgacgccagcagtcgcttttatgcacagtggattgaaaatgccgtgcgcggcacctttgatcatcaatgtctgattttacgtgcggcgtccggcgatattcgcggctatgtctctttacgggaactcaatgcgacagatgcgcgaattggcctgctggctggacgcggtgcaggtgctgagctgatgcaaacggcgctaaactgggcgtatgctcgcggtaaaacaactttgcgggtggcgacccaaatgggcaacaccgccgcgcttaaacgatacatacaaagtggtgcgaatgtagaaagcaccgcgtactggttatacaggtgatcacatgattccatttaacgcaccgccggtggtgggaaccgaactcgactatatgcagagcgcaatgggtagcggcaaactgtgtggcgatggcggttttacccgtcgctgccagcagtggctggagcaacgttttggcagcgccaaagtgttactgacgccgtcctgcaccgctagcctggagatggcggcgctgctgctcgatatccagcctggcgatgaagtgatcatgccgagctacacctttgtctccaccgccaatgcctttgtgctgcgtggcgcaaaaatcgtttttgtggatgttcgcccggacaccatgaacatcgacgaaacgctgattgaagcggcgatcaccgacaaaacgcgcgttatcgtgccggtccattacgcgggtgtggcctgcgaaatggacaccattatggcgttggcgaaaaagcataatttgtttgtggtagaagatgccgctcagggcgtgatgtccacttacaaagggcgtgcactgggaaccattggtcatattggctgctttagcttccatgaaaccaaaaactacacggcgggcggtgaaggcggcgcgacgctgattaacgataaagcgttaatcgaacgagccgagatcatccgtgaaaagggcactaaccgcagccagttcttccgtggtcaggtcgataaatatacctggcgcgatattggctccagctatttgatgtccgatctgcaagctgcatacctgtgggcgcaactggaagcagcggatcgtatcaaccagcaacgtctggcgctgtggcaaaactactacgatgcgttagcgcctctggcgaaagccgggcgtatcgagctgccgagcattcccgatggctgcgtgcagaacgcgcatatgttctacattaaactgcgggatattgatgaccggagcgcgttgattaactttctgaaagaagcggaaatcatggcggtgtttcattacattccgctgcacggttgccctgcgggggaacactttggtgagttccacggtgaagatcgctacaccaccaaagagagcgagcgcctgctgcgcctgccgctgttctacaacctgagccccgtcaatcagcgtacggtaattgcgactttgttgaactacttttcctgatatgagcttggcaaaagcgtccttgtggacggcggccagtacactggtcaagattggtgccgggttactggtcggtaagttgctggcggtgagttttggtccggcggggcttgggctggcggcaaatttccgccagttgattaccgtgctcggcgtgcttgccggggctggcatctttaacggtgtaaccaaatacgttgcccagtaccatgataatccgcaacagctgcgccgcgtggtcggcactagtagtgcgatggtacttggtttctctacgctgatggcgctggtttttgtgctggcagctgcgccaatcagccagggattgtttggtaataccgactatcaggggctggtgcgtttagtggcgctggtgcaaatggggatcgcctggggcaacctgttactggcgctgatgaaaggctttcgcgatgccgcaggtaatgcgttaagcctgattgtcggcagcttgattggcgttctcgcgtactacgtcagttaccgtttgggcggttatgaaggggcgttgctgggtctggcgctgattcccgcgctggtggtaattcctgccgccatcatgttgatcaaacgtggtgtcatcccgttaagctatctgaaacccagctgggataacggtctggcagggcagttgagcaaatttacgctcatggcgttgattacgagcgtgaccttgcctgttgcttacatcatgatgcgtaaactgctggcggcgcagtatagctgggatgaggtggggatctggcaaggggtgagcagtatttccgatgcctacctgcaatttattacggcaagcttcagcgtatatttgctgcccacgttgagccggctaacggaaaagcgcgatatcacccgggaagtggttaaaagcctgaaattcgtcttaccggcagtggcggcggcgagttttaccgtctggctgctgcgtgattttgctatctggctgctgttgagcaataaatttaccgctatgcgcgatctctttgcctggcagttagtgggtgatgtgttaaaagtgggcgcttatgtctttggttatctggtgatcgccaaagcgagtctgcggttttatattctggcggaagtcagccagttcactttattgatggtatttgcccactggctaatccctgcgcatggtgcactgggcgcggcgcaggcatatatggcaacttatatcgtctatttttctctttgttgtggcgtgtttttactctggcgtaggcgggcatgactgtactgattcacgtactgggaagcgatatccctcaccataaccgaaccgttttgcggtttttcaatgacgcgctggccgcgacgagcgagcacgcgcgcgagtttatggttgttggcaaggacgacggcttaagtgatagctgtccggcgctttctgtgcaatttttccctgggaaaaaaagcctggcggaagcggtcatcgcgaaagcaaaagctaaccgtcagcagcgttttttcttccacggtcagttcaatcccacactgtggctggctctgctgagtggtggcattaagcccagccagtttttctggcatatctggggggcagacctgtatgagctttccagtggcttgagatataagcttttttacccactacgtcgcctggcgcaaaagcgagtcggctgtgtatttgccacccgcggcgatttgagcttttttgccaaaacgcacccaaaggtgcggggcgaactgctgttcttcccgacgcggatggaccctagcctcaatacgatggcgaacgatcggcaacgtgaagggaaaatgaccattctggtggggaactccggcgaccgcagcaatgagcatattgctgccttgcgcgccgttcatcagcaatttggcgatacggtaaaagtggtggtgccgatgggatatccgcctaataacgaagcgtacattgaggaagttcgtcaggcggggctggagttattcagcgaagaaaatctacaaattctgagcgaaaaactggaatttgacgtctatctggcgctacttcgtcagtgcgatcttggttactttatttttgcccgccagcagggcattggtacgctgtgcttactgattcaggcgggcattccttgtgtgcttaaccgggaaaatccgttctggcaggatatgacggaacaacatttgccggtgctgtttactaccgacgatctcaacgaggatattgtgcgtgaagcgcagcgccagttggcgagcgtggataaaaacaccattgccttctttagccctaactatctacaaggctggcagcgggcgttggcgattgccgccagggaggtcgcatgagtctgctgcaattcagtggcctgtttgttgtctggctgctctgcacgctgtttattgccacgctgacctggtttgagtttcgccgtgtgcgctttaacttcaatgtcttctttagtttgctgtttttgctcacctttttcttcggcttcccgctgaccagcgtgctggtatttcgctttgatgttggtgtcgcgccgccagaaatcttgttgcaggcgttgctttctgcgggctgcttctacgcggtttactatgtcacctacaaaacccgcctacgcaaacgcgttgctgatgtaccgcgccgtccgctgtttaccatgaaccgcgtggagaccaatcttacgtgggtgatcctgatgggtatcgcgctggtaagcgtcggcatcttcttcatgcacaacggctttttgctgttccggcttaactcctacagtcagatcttttccagtgaagtctccggcgtggcgttaaaacgcttcttttactttttcatcccggcgatgctggtggtctactttctgcgccaggacagcaaagcgtggctgtttttcctcgtcagcacggtcgcctttggcttgctgacttatatgattgtcggcggcactcgcgccaatatcatcatcgcattcgctatcttcctgtttattggcattattcgcggctggattagcttgtggatgctggcggcggcgggcgtgctggggattgttggcatgttctggctggcactaaaacgctatggaatgaatgtgagcggcgatgaagcgttctatacgtttctctatctcactcgcgacaccttcagcccgtgggagaatctggcgttgctgttgcagaactacgacaacatcgacttccagggcctggctccaattgtccgcgatttctatgtctttatcccttcctggctgtggccgggtcgcccgagtatggtgctgaacagtgccaactactttacctgggaagtgctgaataaccactccggactggcgatcagccctacgcttataggcagtctggtggtgatgggcggcgcgttgttcatcccgctcggggcgatcgtggttggtctgatcatcaaatggttcgactggctgtatgagctgggcaaccgcgagcctaatcgctataaagctgcgatattgcacagtttctgctttggggcgatcttcaatatgatcgtgctggcgcgtgaagggctggatagctttgtcagtcgcgtggtcttttttatcgtggtcttcggcgcatgtctgatgatcgcaaaactgttgtactggctttttgaaagcgccggactcattcataaacgtacaaaaagtagcctccggacgcaggttgaaggataacaatgaataacaacaccacggcaccaacctatacgctgcgtggcttacagttgattggttggcgtgatatgcagcacgccctcgattatctgtttgctgacgggcagcttaagcagggaacgctggttgccattaatgctgaaaaaatgctgactattgaagataacgccgaggtcagggagttaattaacgctgccgaatttaaatatgcggatggcatcagcgttgtacgtagtgtacgtaaaaagtacccgcaggcgcaggtttcccgcgttgccggtgccgatctctgggaagagctgatggcgcgcgcaggcaaagaagggacgccggtatttcttgtgggcggtaaacctgaagtgctggcgcaaactgaagctaaactgcgcaaccagtggaatgtgaatatcgttggcagtcaggatggttattttaaacccgagcagcgtcaggcgctgtttgaacgcattcatgccagcggtgcgcaaatcgtcaccgttgcgatgggaagcccaaagcaggagatcatcatgcgcgactgccgtctggtacatccagatgcgctgtatatgggcgttggcgggacttacgatgttttcaccggtcacgtaaaacgcgcaccgaaaatctggcaaacgctggggctggagtggctctaccgcctgcttagccagccgagccgcattaagcgtcagcttcgtttgctgcgttatttacgctggcactacaccggcaacctatgattttcctctctttgtaaagcgacggagtggtcactccgtcgcctgtctgcttttttattacacaaagcattcaaatttttaatgctttatttgccatttctcctgaattacgaaaacatttgcaacactcgatgtacccataacgataaccggtaacaccggaaagcatgcaaacacaacacgaggatttatggcagataacaaaccagagctacagcgtgggctggaagctcgacatatcgaactcatcgccctggggggcaccattggcgtcggcctgtttatgggggccgccagtaccctgaaatgggccgggccatccgtattgttggcctatatcatcgccgggctgttcgtctttttcatcatgcgtagtatgggcgaaatgttgttcctcgaaccggttaccggtagcttcgccgtttatgcgcatcgttatatgagcccgttctttggctatctcaccgcctggtcttactggtttatgtggatggcggtggggatctctgaaatcaccgccattggcgtttatgtccagttctggttcccggagatggcgcagtggatacccgcattgatcgcagtggcgctggtggcgttggcgaatctggcggcggtgcggttgtacggcgaaatcgagttctggttcgcgatgatcaaagtcaccacgattatcgtgatgattgtcattggcctgggcgtgattttctttggctttggcaatggcgggcagagcattggttttagcaatctcacagagcatggcggtttctttgcgggtggctggaaagggttcctgaccgctctgtgtattgtggtggcgtcctaccagggcgtggagctgattggcattactgccggtgaagcgaagaatccgcaggtgacgctgcgcagtgccgtaggcaaggtgctgtggcggatcctgattttctacgtaggcgcgattttcgttatcgtcaccatcttcccgtggaatgaaataggcagcaacggcagcccgttcgtactgacttttgccaaaatcggtattaccgcagcggcgggcattatcaactttgtggtgctgacggctgcgctctctggctgtaacagcggcatgtacagttgcggacgtatgctctacgcactggcgaaaaaccgtcagttaccggcggcaatggcgaaagtttcccgtcacggcgtaccggttgcgggtgtggcagtatctattgctattctgctaattggcagttgcctgaactacatcattcccaatccgcagcgtgtgtttgtctacgtctacagtgccagcgtgcttccggggatggtgccatggtttgtgatattgataagccagctgcgttttcggcgtgcacataaagcggcgattgccagccatccgttccgcagtatcctgttcccgtgggccaattacgtaacaatggcattcctgatttgcgttttgatcggcatgtactttaatgaagatacgcgtatgagcctgtttgttggcatcatctttatgctggcggtgacggcgatttataaagtttttggccttaatcgccacgggaaagcgcataaactggaggaataagcagcaaaacgcacaaaccgtaaccaaacgcgcaatttatttaaaaagggactagacagaggggtgggaagtccgtattatccacccccgcaacggcgctaagcgcccgtagctcagctggatagagcgctgccctccggaggcagaggtctcaggttcgaatcctgtcgggcgcgccatttagtcccggcgcttgagctgcggtggtagtaataccgcgtaacaagatttgtagtggtggctatagctcagttggtagagccctggattgtgattccagttgtcgtgggttcgaatcccattagccaccccattattagaagttgtgacaatgcgaaggtggcggaattggtagacgcgctagcttcaggtgttagtgtccttacggacgtgggggttcaagtccccccccctcgcaccacgactttaaagaattgaactaaaaattcaaaaagcagtatttcggcgagtagcgcagcttggtagcgcaactggtttgggaccagtgggtcggaggttcgaatcctctctcgccgaccaattttgaaccccgcttcggcggggttttttgttttctgtgcatttcgtcaccctcccttcgcaataaacgcccgtaataactcattgccccacggtatgatttcgcccttaacgtattgaaggatgacttcaggcaaggagcgaccatgctgcaacaggttccaacgcgtgcttttcatgtgatggcgaaaccgagcggttccgattgtaatctgaactgtgactactgtttttatctcgaaaaacaatccctttaccgcgaaaagccagtcacgcatatggacgatgacacgctggaagcgtatgtccgtcactatatcgctgccagcgaaccgcaaaacgaagtggcttttacctggcagggcggcgaaccaacgctactcgggctggcgttttaccgccgtgccgtagcgctacaggcgaaatatggtgctggcaggaagataagtaacagcttccagactaacggcgtgctgctggatgacgaatggtgcgcgtttctcgcggagcatcattttcttgttggtttaagcctggatggcccgcctgagatccacaatcaatatcgcgtgactaaaggtggcagacccacgcataagctggtgatgcgtgccctgacgctcctgcaaaaacatcatgtcgactataacgtgctggtctgcgttaatcgcaccagcgcgcagcaaccgttgcaggtatatgattttttgtgcgatgcgggagtcgaattcatccagtttattccggtggtcgagcgcctggctgatgaaacaactgcccgcgatggacttaagttacatgcgcctggtgatattcagggtgagctaacggaatggagcgtgcgccccgaggagttcggtgagtttctggtggcgatattcgaccactggatcaaacgcgacgtcggcaagattttcgtgatgaatatcgaatgggcgtttgccaattttgtcggtgcgccgggtgcggtttgccatcatcagccaacctgtgggcgcagcgtgattgttgagcacaacggcgacgtttacgcctgtgatcactatgtttatccgcaatatcggctggggaatatgcaccagcaaacaattgcagaaatgatcgattccccgcaacagcaggcgtttggtgaagataaatttaagcagttaccggcgcagtgtcgcagttgtaacgtgttaaaagcgtgctggggaggctgcccgaaacaccgcttcatgctcgatgccagcggcaaaccgggactgaattatttgtgtgccgggtatcagcgttatttccgccatctaccgccatatcttaaagcaatggctgatttgctggcgcacggtcgcccggccagcgacattatgcatgcgcatttgctggtggtgagtaagtaaaaatcggcggccgcctgcggttgattgccggatgcggcgtaaacgccttatccggcctacatgatcgtgcaaattcaataaattgcagcgttctgtaggctggataagatgcgtcagcatcgcatccggcaaaggcagatctcagcgatagcgccggcttagtcagatttaatctgcgcgcgtggtggatattttttcaggatctccatatacgcgtgcatttcggtctgtagcggtacacccatcggaatatggcgcacgccgatggagtcgctttcctgcggatcggtgtagaggttaaacacgctgcttcccgccgtttgcattactgtgccggtgaatccaccctgatatccgctctgggtataagcgtaaggttgctgaatcaggacgtgatacttgaactcatccatacgcacagcagcgagtttaccgttgaggaagtagtgctcggccttacggttagactgaccatttgttcccaggaagaaggatgtctggtccacaccatcgataaaggtggttttcggcactaaattcgccactttcgctccaggatgccctgccagatccagcgcggtagggaagagatctgccagatcgacaataccgtcagatttacgcggttggatcatccctttccagtaaacgaaagtcggtacgcgaacgccgccttcccaggtgctacctttcgcaccacggaacggggtgcgtccgtgcggcggtacttcggcttccggtccgttatcggaggtaaagacgatcagcgtgttatcaagctgaccgtttttctccagtgttttatacagattagcgaacacatcgttcatctccaccatgcagtcgccatagctggtgcgtgccggagagctacccgcatatttcgcatttgggtagttatcgaagtggcagccacgagtgccgtagtagaggaagaatggtttatcgctcttcgccatcttgtcgaggaacttaacgccatagtccatccagcgttgatccagatcttccatatatttcggcgtaatgtcggcaatggcctgttgttcgccgccgcgcaccgcatgaacgtcatctttgctgaacggtaattgcttgatgtattcagaacggtccggactcagggccacttccggattgacgtgaacgtcgcgccattcggtgtacatatcagacacgctgttaaagccacggaaatcatcaaagccaacgttctgcggctggctctctttgttttcccccatatgccattttccgatggcctgagtgacgtagccctgatcgtgcagcaactgcggcagcgtggttaacccttgcagcccgcccggttgcccgtacattggcggcatcagaatgccgtggtggatggagtattgtccggtgagaatggtggcgcgggttggggaagagcttggttgagaatacgcgctagttaaaatcagcccctggctggcaacggcgtcgatatctggtgtagggttacccaccgccacgccgccaccgttaaaaccgacgtccatccagcccacatcgtccagcaagaaaacaaccacattcggtttcttaccggtttttttctcaagttctgccagcttctgctgggtttctttatcctgcgccggatgctgcattactggcatcatattgtcggcaatagtggtcgccggtttaaccagatactggtttgggtgatcgtatccggcaaagcctttgcgtgcggtggcagtactcggggtatctgctgcgctggccatgagaggaagagcggcggcgacagcaacaacaagacgtttgggactaaagctaaattccatgcaaaatgctccggtttcatgtcatcaaaatgatgacgtaattaagcattgataattgagatccctctccctgacaggatgattacataaataatagtgacaaaaataaattatttatttatccagaaaatgaattggaaaatcaggagagcgttttcaatcctacctctggcgcagttgatatgtaaggcaggtttattatatcgcgttgattattgatgctgtttttagttttaacggcaattaatatatgtgttattaattgaatgaattttatcattcataataagtatgtgtaggatcaagctcaggttaaatattcactcaggaagttattactcaggaagcaaagaggattacagaattatctcataacaagtgttaagggatgttatttcccgattctctgtggcataataaacgagtagatgctcattccatctcttatgttcgccttagtgcctcataaactccggaatgacgcagagccgtttacggtgcttatcgtccactgacagatgtcgcttatgcctcatcagacaccatggacacaacgttgagtgaagcacccacttgttgtcatacagacctgttttaacgcctgctccgtaataagagcaggcgtttttttatgtatcaggaaggccccggaggtgcttgcctccgggtgagaaggaattactgtggcgggttattctgcaacgttaacatcaaaccgtcgcgacgcatagctgcagcttcttccggcttgtgcagtctgtccagcgcgtcggcaagccatgcgtaatcgtaggcgtccggacgttgtttcagcgctgcgcggaaggcgaggcttgcttcctgccattctccgtgcttcatcagactctggcccagtgtgctccacaacagcgggcgatcgccgacgtttttgatttgctggcgcagcactttttccagctgttccggattgtttgttttcagtcgaggaatcggcagcagtaggcgatcgtcgtactggcgtttcaggccatcgatgataatttgctgggcagtatcatgatcgtcacattcaataagatgttccgccattgccacctgcaacgctacctgatgacgcgttttccggctttggtttttccaccagttacgcaaaccttcgctaccgttatcggcacgcgcctgatccatcaggccaatccatgcctgttgttccagcattgcacgatgttcttcatcaccaacatgggctttcgccatacttgggataatatccagcaggctactccatgcacctgtgcggatatacgcctgttccgccagacgtaatacttccggatggcgtggcgtaacttccagcagcttatccacgccgtggcgtgcagcatggttttcattacgggccagttgcagacgtacgcgggtgatttctaccggaatggtgtcgttgccggccagctccgctgcgcgttccagatgttggttggcgcgtgcttcatcaccacgttgttgcgcggcttcggcagccagtagatagttcaccaccggttgttccgcgtgatcggcatttttcgccatcagcttttcaacttgctgataatcgccttccgccagtttcagcagcgcctgttcggtctgcttacgtgcacggcgacgcttacgtccgacaaaccacccacgggtgtgcgcgccagtgcggaagatccgccgcagtagccactcaatggcaaacagcactaccatcgccagaatcaatatgatcgccaggcccgtgacgctggtttcgatattgtagttgtcggtctggatcagcacataaccctgatggccggcaatcatcgggccaaccacgatccccgcaatcagcaacacaaagagcaataacacttttagcatggttattctccttgcggcgcggctgccggagtatcagcttgcggtgcaggtgcaggtttagcttccgttgtccccgctgccggttgtgccagcaggttacgcacgcgagtctgcatcagtttttccagcatcgcctggctttgcagggtttccggaagatccatgctgatattttgctggcttaactggtccacctcgtcgaggaacgctttggtggtggcatcatcagtatcgtagtaagcacgtacccaggtggagacgttctccagcgcctggcgataagtctcttcctggtgacgcggtacagcttgtgctgcgaccagcaggcgagagcgaatattttcgcgcagatagatatcctgatttggcgctaacagcggtacggcggtgtcatcacgacggcgaatcgtaatgaagttgtccataaagttctgccagcttttttgcagattgatacgccattcgctgatggaactggaaagctcttcaccgtcactatccatcgggctaccatcgctgtcattatcggccagacgcaggttatctacctgattactaagctgattaagcttaaggatgatgccgtcataatccacctggcttactgcagaaaggctggcgatatcatcggtaattgcccgacgaacggtaatcagactcgggtcattcatatccgccaggctggcgtctgcacttttcagcaacgctgcagcggtcgtgacgtcctgatcgctccacagcttccgtccggcgagtttcaccagaaaatcggcctgagccagcagccaggttttagcatcgctgccggaaatggtggcgaccttttgttggacttcatccaactgttttgccagcgtttcttgctgacgattcgcctgcttaagttgtgcagcttgttgcttaataatgccttccagctcggctttttggctctcctgggctttttgcaatgccgtcagttggttagccagggcatcgctggtggcggtctgattgacggcctgttgtttaccccagccatacaaaccgatgcccgccgccagagcaatagcgatagccaccgcgctgagaatcaatgcggtattgttcttactctttttttctgttgcgacaggttgactcgtggtgtccacggcctccctggtctcttcaaccacggcggaggttttttcttgttccgtcattatggcttcctgttatgagagttattgtaatgcccgtaaaagcgcatcgttgtcagcgttatcggcgaccttaatgtcttgccagcccagttcccgggcgagtttcgccaaacgctcactgacgaccaatagtcgacagtgtagtaaccagtgctcacgataccattgtgggatcaggctccagagttgctgcaacatttcaccgctggtaacaacgaccatcgtcacctcgcgggcttgccagcgcatcgcttcttctgcaccatcgtaatggattgcgcatcgttgataacattcacaaaaagtgacctcagcaccgcgcgccgtcagggtatccccaattagctcacgaccaccattgccacgtaatatcagcgcacgtttgcccgcaatattttgtaattcaggtaattgtagcaagacttcgctgatttcccgatcctgcgggtagagaatcttctgtccacttacggtatgtagtgccagtgcggtggtgcgtccaatggcgaaataatcaggtagtcggggccatttacgatcttgctgatgcagctgactttgggcaaaagcaaccgcgtgttggctgagggcaaacaacagatcgctctcccccagcgctgccagttgatcagcaagttgcggtaattgttgacccggagaaaactcaatcagcggaaaatgccaggccacctgccccagtgtgcgcagacggctcactaactcttctccagcgggagacgggcgggtgacaaggatactcatgccggggcgtctccgttatagacttcagcgaggatctcgcgcgcgccgttattcagtagctcttctgccaggctaatccccatttgttcggcatcttgcggcgcaccgcggcgttcaccgcgaataatctggctaccgtccggcgcgccgaccagcgcacgcagccagatttcgccatcaataagctcggcgtagctaccaattggcacctgacatccgccttcgagacgggtattcatggcgcgttctgcggtaacgcgcagtgcagtttcgtggtgattcagcgcggcaagcagctcgcgagtgcgactatcatcaaggcggcattcaatacccaccgcaccttgtcctaccgccggaagagaaatctcgggtggcaacgcggcgcgaatacgactctccagacctaaacgttttagtccggctacggcaagaatgatggcatcgtattcgccgttatccagtttgctcaggcgagtgccgacgttgccgcgcagggagcggataatcagatccggacggcgttcagccagttggcactggcgacgtaaactggacgtcccgacgatactgcctgccggtaacgcatccagactgtcatagttattggacacaaaggcatcgcgaggatcttcacgctcacaaatagtgaccagtcccagaccttgcgggaattcaaccggcacatctttcatactgtgtacggcgatatcggcgcgattttcgaggagcgcgacttccagctcttttacaaataagccttttccgcctactttcgccagcggcgtatcaagaatcacatcgccgcgcgtcaccatcggtaccagttcaacgaccaggcccggatggctcgccatcaacttgtctttgacatagtgtgcctgccagagtgcaagtgggctttggcgtgtggcaattcttaaaacattgtctaacatgcttgttaccgtcattatcatccgtggtccatcctaacatccttgccagagtgatgtcagtgttgtggtgaaacgtagacgcctgcgcaaaccgtaaaatgaggtctggcagtggatcctgacaggcgtttcacgccgttgtaataaggaatttacagagaataaacggtgctacacttgtatgtagcgcatctttctttacggtcaatcagcaaggtgttaaattgatcacgttttagaccattttttcgtcgtgaaactaaaaaaaccaggcgcgaaaagtggtaacggttacctttgacatacgaaatatcccgaatgccgcgtgttaccgttgatgttggcggaatcacagtcatgacgggtagcaaatcaggcgatacgtcttgtacctctatattgagactctgaaacagagactggatgccataaatcaattgcgtgtggatcgcgcgcttgctgctatggggcctgcattccaacaggtctacagtctactgccgacattgttgcactatcaccatccgctaatgccgggttaccttgatggtaacgttcccaaaggcatttgcctttacacgcctgatgaaactcaacgccactacctgaacgagcttgaactgtatcgtggaatgagtgtacaggatccgccgaaaggtgagcttccaattactggtgtatacaccatgggcagcaccagctccgtagggcaaagttgttcctctgacctggatatctgggtctgtcatcaatcctggctcgatagcgaagagcgccaattgctacaacgtaaatgtagcctgctggaaaactgggccgccagcctgggtgtggaagtcagcttcttcctgattgatgaaaaccgcttccgtcataatgaaagcggcagcctggggggcgaagattgtggctccacccagcatatactgctgcttgacgaattttatcgtaccgccgtgcgtctcgccggtaagcgtattctgtggaatatggtgccgtgcgacgaagaagagcattacgacgactatgtgatgacgctttacgcgcagggcgtgctgacgccaaatgaatggctggatctcggtggcttaagcagcctttctgctgaagagtactttggtgccagcctttggcagctctacaagagtatcgattccccatacaaagcggtactgaaaacactgctgctggaagcctattcctgggaatacccgaacccacgtctgctggcgaaagatatcaaacagcgtttgcacgacggcgagattgtaagctttggtctcgatccatactgcatgatgctggagcgtgttactgaatacctgacggcgattgaagattttacccgtctggatttagtacgtcgctgcttctatttaaaagtgtgcgaaaagctcagccgtgaacgcgcctgcgtaggctggcgtcgcgcagtgttgagccagttagtgagcgagtggggttgggacgaagctcgtctggcaatgctcgataaccgcgctaactggaagattgatcaggtgcgtgaggcgcacaacgagttgctcgacgcgatgatgcagagctaccgtaatctgatccgctttgcgcgtcgcaataaccttagcgtctccgccagtccgcaggatatcggcgtgctgacgcgtaagctgtatgccgcgtttgaagcattaccaggtaaagtgacgctggtaaacccgcagattagtcccgatctcagcgaaccgaatctgacctttatttatgtgccgccgggccgggctaaccgtagtggttggtatctgtataaccgcgcgccaaatattgagagcatcatcagccatcagccgctggaatataaccgttacctgaataaactggtggcgtgggcatggtttaacggcctgctgaccagccgcacccgtttgtatattaaaggtaacggcattgtcgatttgcctaagttgcaggagatggtcgccgacgtgagccaccatttcccgctgcgcttacctgcaccgacaccgaaggcgctctacagcccgtgtgagatccgccatctggcgattatcgttaacctggaatatgacccgacagcggcgttccgcaatcaggtggtgcatttcgatttccgtaagctggatgtcttcagctttggcgagaatcaaaattgcctggtaggtagcgttgacctgctgtaccgcaacagctggaacgaagtgcgtacgctgcacttcaacggcgagcaaagcatgatcgaagccctgaaaactattctcggcaaaatgcatcaggacgccgcaccgccagatagcgtggaagtcttctgttatagccagcatctgcgcggcttaattcgtactcgcgtgcagcaactggtttctgagtgtattgaattgcgtctttccagcacccgccaggaaaccgggcgtttcaaggcgctgcgcgtttctggtcaaacctgggggttgttcttcgaacgcctgaatgtaagcgtacagaaactggaaaacgccatcgagttttatggcgcgattagccataacaaactgcacggcctgagtgtgcaggttgaaaccaatcacgtcaaattaccggcggtggtggacggctttgccagcgaagggatcatccagttctttttcgaagaaacgcaagacgagaatggctttaatatctacattctcgacgaaagcaaccgggttgaggtatatcaccactgcgaaggcagcaaagaggagctggtacgtgacgtcagtcgcttctacagcagtagccatgaccgttttacctacggcagtagcttcatcaacttcaacctgccgcagttctatcagattgtgaaggttgatggtcgtgaacaggtgattccgttccgcacaaaatctatcggtaacatgccgcctgccaatcaggatcacgatacgccgctattacagcaatattttagctgatgaacgtgccggaaagcgaggcttatccggcatgcaatcttagcggaaactgactgtttcacccgcctgctgcgtcgccgcctgttccagcaaatcccagaaggtttcgccgctgcgatcacaaatccactcatcgcctttcaggtcaaaatggtagccgccctgtttggttgccagccatacctggtgcagcggctcctggcggttgataatgattttgctgccattctcaaaggtaatggtcagtacgccgccgttgatttcgcagtcgatatcgctgtcgccatcccagtcgtccaggcgttcttcaatggtcagccagagttgatcagccaggcgatgaaattcactgtcgttcattgttgtatcctgtttttaagtgatggcggcagtatagcggcatggggtcagggcttcaaagtttgcacctctgcggctgcgttccggcacgatagttccgtcaccggaataatgatgtctctgtgtagcgaaagatttgtctctagtttagggcgcagttacaccacgtctttccctgtttctggtaaacattatgatcaggtttaccgagcgagcatcctcacgctgacggaactaaaaaagacaacaaacaaaccacattgcgatagtgcataaagccatcctggcgcgaggtgccgatcacgaaactaccagcaaaacataaatccccacgagtaagcgttatactcgcagcatttcctcacttttcagacttcataaagagtcgctaaacgcttgcttttacgtcttctcctgcgatgatagaaagcagaaagcgatgaactttacaggcaatccataatgaaaaacgtgtttaaggcactcactgtattacttactctcttcagcctgacgggctgcggtctgaaaggtccgctctatttcccgcctgcagataaaaacgcaccgccgccgaccaaaccggtagagacgcaaacgcaatccacggtgccggataaaaacgatcgcgccactggcgatggtccatcccaggtgaattactaaaagtcagtttctgtacccgcgtgattggagtaaatgatgcagttcagcaaaatgcatggccttggcaacgattttatggtcgtcgacgcggtaacgcagaatgtcttttttagtccggagctgattcgtcgcctggctgatcggcacctgggggtagggtttgaccaactgctggtggttgagccgccgtatgatcctgaactggattttcactatcgcattttcaatgctgatggcagtgaagtggcgcagtgcggcaacggtgcgcgctgctttgcccgttttgtgcgtctgaaaggactgaccaataagcgtgatatccgcgtcagcaccgccaacgggcggatggttctgaccgtcaccgatgatgatctggtccgcgtaaatatgggcgaacccaacttcgaaccttccgccgtgccgtttcgcgctaacaaagcggaaaagacctatattatgcgcgccgccgagcagacaatcttatgcggcgtggtgagcatgggaaatccgcattgcgtgattcaggtcgatgatgtcgataccgcggcggtagaaacgcttggtcctgttctggaaagccacgagcgttttccggagcgcgccaatatcggttttatgcaagtggttaagcgcgagcatattcgtttacgcgtttatgagcgtggggcaggagaaacccaggcctgcggcagcggcgcgtgtgcggcggttgcagtagggattcagcaaggtttgctggccgaagaagtacgcgtggaactccccggcggtcgtcttgatatcgcctggaaaggtccgggtcacccgttatatatgactggcccggcggtacatgtctacgacggatttattcatctatgaagcaaccaggggaagaactgcaggaaacactcacggagcttgatgaccgggcggttgtcgattatctgattaaaaatcctgagttttttatccgtaatgcgcgcgcagtagaagcgatacgtgtgccgcatccggtacgcggcaccgttagcttggtcgagtggcacatggcccgcgcacgtaatcatattcatgttctggaagagaacatggcgctgttgatggaacaggctatcgccaacgaaggcctgttttatcgcctactctacctgcagcgcagtctcaccgccgccagcagtctcgacgatatgctgatgcgctttcaccgctgggcgcgcgatctcggcctggcaggtgcgagtctgcgcctgtttccggatcgctggcgcttaggtgcgccgagcaaccacactcatctggcattaagccgtcagtctttcgaaccgctgcgtattcagcgtttggggcaggaacagcactatcttgggccgcttaacggaccagagctgctggtggtgctaccggaagcgaaagcggtgggaagcgtggcgatgagcatgctgggaagcgatgctgatttgggtgtcgtgctgtttaccagtcgcgatgccagtcactatcaacaagggcaaggaacgcagttacttcatgaaattgcgctgatgttgccggagcttctggagcgttggattgaacgcgtatgaccgatttacacaccgatgtagaacgctacctacgttatctgagcgtggagcgccagcttagcccgataaccctgcttaactaccagcgtcagcttgaggcgatcatcaattttgccagcgaaaacggcctgcaaagctggcagcaatgtgatgtgacgatggtgcgcaattttgctgtacgcagtcgccgtaaagggctgggagcagcaagtctggcgttacggctttctgcgctacgtagcttttttgactggctggtcagccagaacgaactcaaagctaacccggcgaaaggtgttagcgcaccgaaagcgccgcgtcatctgccgaaaaacatcgacgtcgacgatatgaatcggctgctggatattgatatcaatgatcccctcgctgtacgcgaccgtgcaatgctggaagtgatgtacggcgcgggtctgcgtctttctgagctggtggggctggatattaaacacctcgacctggagtctggtgaagtgtgggttatggggaaaggcagcaaagagcgccgcctgccgattggtcgcaacgctgtggcgtggattgagcactggcttgatttgcgcgacctgtttggtagcgaagacgacgcgctttttctgagcaaactgggcaagcgtatctccgcgcgtaatgtgcagaaacgctttgccgaatggggcataaaacaagggctgaataatcacgttcatccgcataaattacgtcacagcttcgccacgcatatgctggagagcagcggcgatcttcgtggtgtgcaggagctgctgggtcatgccaacctctccaccacgcaaatctatactcatcttgattttcaacaccttgccagcgtgtacgatgcggcgcatccacgcgccaaacgggggaaataatgcgtttttaccggcctttggggcgcatcagcgcgctcacctttgacctggatgataccctttacgataaccgtccggtgattttgcgcaccgagcgagaggcgcttacctttgtgcaaaattatcatccggcgctgcgcagcttccagaatgaagatctgcaacgcctgcgccaggcggtacgggaagcggaacccgagatttatcacgacgtgacgcgctggcgttttcgtagcattgaacaagcgatgctcgacgccgggctgagtgccgaagaagccagtgcaggcgcacacgcagcaatgatcaactttgccaaatggcgcagccgaatcgacgtcccgcagcaaactcacgacaccttaaaacagctggcgaagaaatggccgctggtggcgatcaccaacggtaacgcccagccggagctgtttggtttgggggattattttgagtttgtgctgcgcgctggcccgcacgggcgcagtaaaccgttcagcgatatgtactttttggctgcggaaaaactcaacgtgccgatcggcgagatcttacatgttggggacgatctcaccactgacgtgggtggggcaattcgcagcggaatgcaggcttgttggatcagaccggaaaatggcgatctgatgcaaacctgggacagccgtttactgccgcatctggaaatttcccggttggcatctctgaccagcctgatataatcagcaaatctgtatatatacccagctttttggcggagggcgttgcgcttctccgcccaacctatttttacgcggcggtgccaatggacgtttcttacctgctcgacagccttaatgacaaacagcgcgaagcggtggccgcgccacgcagcaaccttctggtgctggcgggcgcgggcagtggtaagacgcgcgtactggtgcatcgtatcgcctggttgatgagcgtggaaaactgcagcccatacagcattatggcggtgacgtttaccaacaaagcggcggcggagatgcgtcatcgtatcgggcaactgatgggcacgagccagggcggtatgtgggtcggcaccttccacgggctggcgcaccgtttgctgcgtgcgcaccatatggacgccaatctgccgcaggatttccagatcctcgacagtgaagaccagctacgcctgcttaagcgtctgatcaaagccatgaacctcgacgagaagcagtggccgccgcggcaggcaatgtggtacatcaacagccagaaagatgaaggcctgcgtccgcatcatattcaaagctacggtaatccggtggagcagacctggcagaaggtgtatcaggcgtatcaggaagcgtgtgaccgcgcgggcctggtggacttcgccgagctgctgctgcgcgctcacgagttgtggcttaacaagccgcatatcctgcaacactaccgcgaacgttttaccaatatcctggtggacgaattccaggataccaacaacattcagtacgcgtggatccgcctgctggcgggcgacaccggcaaagtgatgatcgtcggtgatgacgaccagagtatctacggctggcgcggggcgcaggtggagaatattcagcgtttccttaatgatttccccggtgccgaaactattcgtctggagcaaaactaccgctctaccagcaatattctgagcgccgctaacgccctgattgaaaacaataacgggcgtctgggtaaaaaactgtggaccgatggcgcggacggtgagcctatttccctctattgcgcttttaacgaactcgatgaagcgcgttttgtggttaaccgcatcaaaacctggcaggacaacggcggagcgcttgccgagtgcgccattctctaccgcagcaacgcccagagccgggtgctcgaagaggcgttattgcaggccagtatgccgtaccgtatttacggcgggatgcgcttcttcgaacgccaggaaatcaaagatgcgctcagctatctgcgcctgattgccaaccgcaacgacgacgcggcctttgagcgtgtggtgaatacgccaacgcggggtattggtgaccggacgctggacgtggtacgtcagacaagccgcgatcgccagttaacactctggcaggcatgtcgtgagctgttgcaggaaaaagccctcgccgggcgagctgccagcgccttgcagcgatttatggaattaatcgacgccttagcgcaggaaactgccgatatgccgctgcatgtacagactgaccgggtaattaaagactccggcctgcgtaccatgtatgagcaggagaagggcgaaaaaggtcagacgcgtatcgaaaacttagaggaactggtgacggcaacgcgccagttcagctacaacgaagaagacgaagatttaatgccgctgcaggcgttcctctcccatgcggcactggaagcaggtgaagggcaggcggatacctggcaggatgcggtgcagttgatgacgctacacagcgcgaaaggcctggagttcccgcaggtgtttatcgttggtatggaagagggcatgttcccaagccagatgagcctggatgaaggcgggcgtctggaagaagaacgccgtctggcctacgttggcgtaacccgcgcgatgcagaaactgacgctgacctacgcggaaacccgccgtctgtatggtaaagaggtttaccatcgcccgagccgctttatcggcgagctgccggaagagtgtgtggaagaggtgcgcctgcgcgccacggtaagccgcccggtcagccatcagcggatgggtacgccgatggtcgagaacgacagcggctacaagctcggccagcgcgtacgccacgctaagtttggtgaaggcaccattgtcaatatggaaggcagcggtgagcatagccgtttgcaggtggcatttcagggccagggtattaaatggctggtggcggcatacgcccggctggagagcgtgtaacgttgccggatgcggtgctgcgcaccttatttggcctaaaaaatcattcagattcaataaattgcaacgtcatgtaggccggatagggcgtttacgccgcatccggcatctgcgccatcttcagtatctgacacaaaactatcgttttaacctttccgctcgacggaaatcatggtgacaaaaggatagcgttgccacgggattgccccgcctttcatatacatatgactaatcgtgccatcaagataaagcagctgctcaacgttcagtttcgctttggcataacaggcaaaatcataaaaatttgttgcctgctggctcaacaaaaacacggcgttcccatgtttattaatcccaacaccgttacgaattttgctactggcgacgttgggatgaatacgcggattaattacaccgttttccatcaacattggcccactctgcaccgcaaactgaatctctttactggttttgaaggcatccagacgaacgatgccgactttatctcccgcgacataaaacacgccgccaggacggataaagaaattcccttcaccactagcgagatttaacgccaccttctgctgaccgttttcgatgtacaaaccgagcggcgcatagctttcatcatagatgccgccgttcatcgccatctgcacctgaccctgactattaatatccgccagcagagcatgtaacgttccccacgcttcgccattggctttttgccagtacattttcacccgctctgtttgaggattaacggtatacgcctgtacggtcagcgtcggatcactgagtgcgcaatcatcagcggcaacagcaaacaagggaggtaaggtgagggcgagaaaaatccgtttgagattcaaggtgatcattcctttaccaatgagtagctgatgcgccattataggtcctggatgtgggatttttttatcctgttagcgaccttgacgagtaccaaaaagcgcgaagttcaactattgttctgtggtgttctgttgcgtgttgacggcaaaattttgctggcgtaacatgcgcgcacgatcactctaagaggacattcgccttggacacacccagtagatactggctcactatcctgtcatccaggatcaactcctaaggctatccctttttgctgatagccttagcggttgtcagcgacctcaatttttcccgtcgcgctgagtcaggctgtttaatggtctgaaacccaatttgtttctgtgtgcccaccgaactgtccgatattttaagcattgggagtcccggtcatgctgagcgcatttcaactggaaaataaccgactgacccggctggaagtcgaagagagtcaaccccttgtaaatgcagtatggattgatcttgtcgaaccggacgacgacgagcgactgcgcgtacaatctgaacttggccagagcctggcaacccgcccggaactggaagacatcgaagcaagcgcacgtttctttgaagacgacgacggcctgcatattcactccttcttcttctttgaagatgcggaagatcacgccggtaactccactgtggcatttaccatccgtgatggtcgtctgtttactctgcgtgagcgtgaactgcccgcttttcgtctgtatcgtatgcgtgcccgtagccagagcatggtagacggtaacgcctacgagttgctgctggatctgttcgaaaccaaaatcgaacagttggcagatgaaattgaaaatatctatagcgacctggagcagttgagccgggtgattatggaagggcatcagggcgatgagtacgacgaggcgctctccactctggcggaactggaagatatcggctggaaagttcgcctgtgtctgatggatacccagcgcgcgctcaacttcctggtgcgtaaagcgcgtttaccgggtgggcaactggagcaggcgcgtgaaatcctgcgagatatcgaatccctgctgccgcataacgaatccctgttccagaaggtgaacttcctgatgcaggcggcaatgggttttatcaacatcgagcagaaccgcatcatcaaaatcttcagcgtggtatccgtggtattcctgccgccgacgctcgttgcttccagctatggcatgaactttgagtttatgccagaactgaagtggagcttcggctaccctggcgcgattatctttatgatcctcgcgggcctggcaccgtatctgtactttaagcggaagaactggttgtaaaaaacgagagcggtggcttagtctggctaagccacctgttattcaaaggctccaggtatttaacccttttacctctttctcatagaaccatttgttcgtgttaacagcaacataggctgctacggcaattcccagaatgttaacgccaattagtgcaccaacaaatagagatagaataccaagtaatagaactataattgcttttttccataaccccaggacaaataaatatatccaggaacagaagaaagcaatgaaattcatttgaatagttaagcgttgtcttacttttaatgctttaaatgctgctttatattctggtgttgccccccagaatccaggaaaaccatgttgatcataaaaattaaatcggtatttccatttttcacttaaactaccatcgttcatatattccttactcataaatactccataattattgtttactactatcagtaggtgcaagcattagcatactgaaagtggaaaaataacaaatcaaaaaaatcatgctaccattgccactacaggcaaaatcttcggctatcattgtgatgatagagatgatatatactgctaatgtaccaaaaacataagtttttatatagatgaaaccactatcacggagtcgctggcaattcatgttgatgacgagataatggagtacgatggtagagactataacaagaaagcctgcttctccatcgttaaaaaagataataagaaaggcaaaaatgaaatttattaaaataaaactaaatatataacgacgtctggaaatcttaccgttagatgttgggataaatatacgtaacataaattttacatccttgtatgagtctccggtcagcatggcaatatgcccactctcatgcaagagtcggcatattttttcagaatatatttattttttatttggacgttctacgctgcgtataaatcgcatccatcacaaaaattgccagcgccacccaaataaaggcgaaagtcaccatcttatcggcacccggtttttcaccataaaacgtcacagccagcaggaacatcagcgtcgggccaatgtactggaaaaagcctaacgtactgagacgcaagcgcgtggcagcggcggtaaaacacaacagcggtacggtagtgacaataccggcggcgatcagcagtaaattcaggctcatcgggttttgccccatatggctggtactgctgtcggcaatagcaaacaggtaaattgccgccacgggcagcagccacatggtttcgattaacatgccggtttgcgcttcaacggcaatcttcttgcgtaccagaccgtagaaggcaaaactaaatgccagtcccagcgcgataataggtaggctaccaaaagtccacagctggactaacacgccacatatcgccagaatcaccgccagccattgcatccggcggaatcgctcgccgaggaaaatcatccccagcacaatgttcaccagcgggttaataaagtaaccaaggctcgcttccagcatatggtgattgttcaccgcccagataaacagtagccagttgccaccaatcagcacggcagagactgccagcataaaaattttctgtggcgtctgaatcagcgtttttaaataggaccactggcggcaaatgctcatcagcaccaccataaagaaaaagctccagatcacgcgatgcgtcaggatttcatcggcgggcacgtagtaaatcaacttgaagtacgctggcgctataccccaaataaaataagcggcaagagcgagtaatacgccctgccgcgtttgttttgcatccatcgggaatactcatttttaattggtaacagcagtttacctgcttttatgtcttcaacctaccatataggtggcggtggcactggcaatataaagctgttcttcattgtgtaattcaacgcgggcgacggcgactttattgcctgcacgcaacaggctactagtagcagtaaaacgctcgcccctgcctgggcgcagataatcaacgcgaagatcaatggtccccatccggcttagccgctggcgtagttcatcttcactgatggtttcgtggcgggttaaggtacttcccacgcacaccagaccggcggcgacatccagcgcgctcgcaatgaccccgccgtgcaaaatgctttgcgcccagttgcccaccatcattggctgatttttaaaggccagctgtgcgaactctttttcgtaacgctccagttccatccccaatgcgcggttaaatggcatgtgataaacaaacatctcacccactaatttcagggcttgttcagcggtcagtacggcagacatatcatccttacacttcattggttaatgaaatgttgattttatgcttctttgttgttggtttctactttaggaagggataactaacggctatggagttaagtatgtaaaatagcccgcagaaaaatattcaccttatcaataattcgttacggagaacacgaccgatgcggactctgcagggctggttgttgccggtgtttatgttgcctatggcagtatatgcacaagaggcaacggtgaaagaggtgcatgacgcgccagcggtgcgtggcagtattatcgccaatatgctgcaggagcatgacaatccgttcacgctctatccttatgacaccaactacctcatttacacccaaaccagcgatctgaataaagaagcgattgccagttacgactgggcggaaaatgcgcgtaaggatgaagtaaagtttcagttgagcctggcatttccgctgtggcgtgggattttaggcccgaacagcgtgttgggtgcgtcttatacgcaaaaatcctggtggcaactgtccaatagcgaagagtctagtccgtttcgtgaaaccaactacgaaccgcaattgttcctcggttttgccaccgattaccgttttgcaggttggacgctgcgcgatgtggagatggggtataaccacgactctaacgggcgttccgacccgacctcccgcagctggaaccgcctttatactcgcctgatggcagaaaacggtaactggctggtagaagtgaagccgtggtatgtggtgggtaatactgacgataacccggatatcaccaaatatatgggttactaccagcttaaaatcggctatcacctcggtgatgcggtgctcagtgcgaaaggacagtacaactggaacaccggctacggcggcgcggagttaggcttaagttacccgatcaccaaacatgtgcgcctttatactcaggtttacagcggctatggcgaaagcctcatcgactataacttcaaccagacccgtgtcggtgtgggggttatgctaaacgatttgttttgatgaacggttgagtggttggcaaatctggaatccagcatccaggattaccctctcagagactaaaagcattgcagtttctcgcgcaggcgctgaaaatagcgcctgtttttatttcaggcaatcggggtgaatgtggcgcaggcggaagtgttgaatctggagtccggagctaaacaggttttacaagaaacctttggctaccaacagtttcgccccggccaggaagaaattatcgacactgtgctttccggccgcgattgcctcgtcgtcatgcccactggtggcggaaaatccctttgctatcaaatccctgccttattgctaaacggccttaccgtggttgttagtccgctgattagcttgatgaaagatcaggtggatcaactgcaagccaacggcgtggcggcggcgtgccttaacagcacgcaaacccgcgaacagcaacttgaagtgatgacaggctgccgcaccgggcaaattcgtctgctttatatcgccccggaacgcctgatgctggataactttcttgagcatctggcgcactggaatccggtgttattagccgttgatgaagcgcactgtatctcccaatggggccacgatttccgcccggaatatgccgcgctcggtcagttgcgccagcggttcccgacgctgccgtttatggcgctgaccgccacagccgacgacaccacgcgccaggatatcgtgcgcctgctggggctgaacgatccgctgattcaaatcagcagttttgaccgtccgaatattcgctacatgctgatggagaagttcaaaccgctcgatcagttgatgcgctacgtgcaggaacagcgcggtaagagtggcattatctactgcaacagccgcgcgaaagtagaagacaccgctgcgcgcctgcaaagcaagggaattagcgcggcggcctatcatgccgggctggaaaataatgttcgcgccgatgtgcaggaaaaattccagcgcgatgacctgcaaattgtggtggcgacggtggcgttcggcatgggcatcaataaaccaaacgttcgcttcgtggtccactttgatattccgcgcaatatcgaatcctattatcaggaaaccggacgcgccgggcgtgatggcctgcccgcggaagcgatgctgttttacgatccggctgatatggcgtggctgcgccgttgtctggaagagaagccgcaggggcagttgcaggatatcgagcgccacaaactcaatgcgatgggcgcgtttgccgaagcgcaaacttgccgtcgtctggtattgctgaactattttggcgaagggcgtcaggagccgtgcgggaactgcgatatctgcctcgatccgccgaaacagtacgacggtagtaccgatgctcagattgccctttccaccattggtcgtgtgaatcagcggtttgggatgggttatgtggtggaagtgattcgtggtgctaataaccagcgtatccgcgactatggtcatgacaaactgaaagtctatggcatgggccgtgataaaagccatgaacattgggtgagcgtgatccgccagctgattcacctcggcctggtgacgcaaaatattgcccagcattctgccctacaactgacagaggccgcgcgcccggtgctgcgcggcgaatcctctttgcaacttgccgtgccgcgtatcgtggcgctcaaaccgaaagcgatgcagaaaagcttcggcggcaactatgatcgcaaactgttcgccaaattacgcaaactgcgtaaaagcatagccgatgaaagtaatgtcccgccgtacgtggtgtttaacgacgcaaccttgattgagatggctgaacagatgccgatcaccgccagcgaaatgctcagcgttaacggcgttgggatgcgcaagctggaacgctttggcaaaccgtttatggcgctgattcgtgcgcatgttgatggcgatgacgaagagtaatcagcagcataaaaaagtgccagtatgaagactccgtaaacgtttcccccgcgagtcaaatgtatgttgatgttatttctcaccgtcgccatggtgcacattgtggcgcttatgagccccggtcccgatttcttttttgtctctcagaccgctgtcagtcgttcccgtaaagaagcgatgatgggcgtgctgggcattacctgcggcgtaatggtttgggctgggattgcgctgcttggcctgcatttgattatcgaaaaaatggcctggctgcatacgctgattatggtgggcggtggcctgtatctctgctggatgggttaccagatgctacgtggtgcactgaaaaaagaggcggtttctgcacctgcgccacaggtcgagctggcgaaaagtgggcgcagtttcctgaaaggtttactgaccaatctcgctaatccgaaagcgattatctactttggcagcgtgttcagtttgtttgtcggtgataacgttggcactaccgcgcgctggggcatttttgcgctgatcattgtcgaaacgctggcgtggtttaccgtcgttgccagcctgtttgccctgccgcaaatgcgccgtggttatcaacgtctggcgaagtggattgatggttttgccggggcgttatttgccggatttggcattcatttgattattagccggtgatgccagacgcgtcttcagagtaagtcggataaggcgtttacgccgcatccgacattatttttcacgcatgcctcgcgcttgctaacagcgctcccaccagcataaacaagctgccgaaaatcttattcagcgccttcatctgctttggtcctttaatccatagagcaatccgttgagcaagggtggcgtaaccgatcatcacaataatatcgaccacaatagtggtgacgccgagcacgatatactgcatcagttgcggctgttgcggcatgatgaattgcggaaatagcgccgccagaaacacaatacttttgggattggtgagattcacaaaaactgcgcgctggaacaaatgtcgacggctttgagtagaggccaggcttttaaggtcaattgcaccagcggcgcgccactgctggattcccagccaaatcaagtaagccgcgcctgcccacttcaacacttcaaacgcaatcacactgcgggaaaatagcgtccccaaccccacgccaaccagcacaatatgaatcgccagtccggtctgaagcccagcaatagacgccaccgcgccgcgataaccgtggttgaggctggtggtcatagtgttgattgcaccagagcctgggctcaggcttaaaatgatgcttgtcagcaggtaggcaaaccaccattctaaggtcatgatgaactcccggtgtgtctatttttgtgccacaatacgctactgtcgcagcgttgtgtcaggcacgctaaaaaaaacgattttacgtggtttaagaggcagattacccgatgtttcagcagcaaaaagactgggaaacaagagaaaacgcgtttgctgcttttaccatgggaccgctgactgatttctggcgtcagcgtgatgaagcagagtttactggtgtggatgacattccggtgcgctttgtccgttttcgcgcacagcaccatgaccgggtggtagtcatctgcccggggcgtattgagagctacgtaaaatatgcggaactggcctatgacctgttccatttggggtttgatgtcttaatcatcgaccatcgcgggcagggacgttccggtcgcctgttagccgatccgcatctcgggcatgttaatcgctttaatgattatgttgatgatctggcggcattctggcagcaggaggttcagcccggtccgtggcgtaaacgctatatactggcacatagcatgggcggtgcgatctccacattatttctgcaacgccatccaggtgtatgtgacgccattgcgctaactgcgccaatgtttgggatcgtgattcgtatgccgagttttatggcacggcagatcctcaactgggccgaagcgcatccacgtttccgtgatggctatgcaataggcaccgggcgctggcgcgcgttgccgtttgctatcaacgtactgacccacagcagacagcgatatcgacgtaacttacgcttctatgctgatgacccaacgattcgcgtcggtgggccgacctaccattgggtacgcgaaagtattctggctggcgaacaggtgttagccggtgcgggtgatgacgccacgccaacgcttctcttgcaggctgaagaggaacgcgtggtggataaccgcatgcatgaccgtttttgtgaactccgcaccgccgcgggccatcctgtcgaaggaggacggccgttggtaattaaaggtgcttaccatgagatcctttttgaaaaggacgcaatgcgcagtgtcgcgctccacgccatcgttgattttttcaacaggcataacagtcccagcggaaaccgctctacagaggtttaaatttcttatgtaccaggttgttgcgtctgatttagatggcacgttactttctcccgaccatacgttatccccttacgccaaagaaactctgaagctgctcaccgcgcgcggcatcaactttgtgtttgcgaccggtcgtcaccacgttgatgtggggcaaattcgcgataatctggagattaagtcttacatgattacctccaatggtgcgcgcgttcacgatctggatggtaatctgatttttgctcataacctggatcgcgacattgccagcgatctgtttggcgtagtcaacgacaatccggacatcattactaacgtttatcgcgacgacgaatggtttatgaatcgccatcgcccggaagagatgcgcttttttaaagaagcggtgttccaatatgcgctgtatgagcctggattactggagccggaaggcgtcagcaaagtgttcttcacctgcgattcccatgaacaactgctgccgctggagcaggcgattaacgctcgttggggcgatcgcgtcaacgtcagtttctctaccttaacctgtctggaagtgatggcgggcggcgttagtaaaggccatgcgctggaagcggtggcgaagaaactgggctacagcctgaaggattgtattgcgtttggtgacgggatgaacgacgccgaaatgctgagcatggcggggaaaggctgcattatgggcagtgcgcaccagcgtctgaaagaccttcatcccgagctggaagtgattggtactaatgccgacgacgcggtgccgcattatctgcgtaaactctatttaagctaatcgttctttatttggtcagttgtcaacctgatacttcgctacaatggatacccgttaatcaaagagttttccattgtggcgctacttatcatcaccacgattctgtgggccttctcctttagcttttatggcgagtaccttgcggggcacgtcgatagctattttgcggtgctggtgcgcgttggcctggcggcactcgtttttctgccgtttctgcgtacccgtggcaatagcctgaaaacggtcggcctgtatatgctggtgggcgcgatgcagcttggcgtgatgtatatgctgagtttccgcgcttatctctacctgacggtttccgagctgctgctgttcaccgtgctgacgccgctctacatcacgctgatttatgacatcatgagtaagcgccgtctgcgctggggctatgcctttagcgccttgctggcggtgattggtgccgggattattcgctatgatcaggtcaccgaccatttctggactggcttgctgctggtgcaactctccaatatcacttttgccattggcatggtgggttacaaacgcctgatggaaactcgcccgatgccacagcataacgcctttgcgtggttctatcttggcgcgtttctggtggcagtgattgcatggttcttgctgggaaatgcgcagaaaatgccgcaaaccacgctgcaatggggcattctggtgtttcttggcgtggtggcttccgggattggctactttatgtggaactacggcgcgacgcaggtggacgccggaacgctgggcattatgaataatatgcacgttccggcagggctgctggtaaacctggctatctggcaccaacagccgcactggccaacgtttattacaggcgcgctggtgatcctggccagtctgtgggtgcatcgtaagtgggtcgctccgcgctctagtcaaacggcagatgatcgcaggcgtgattgcgcgctgagcgaataattacaggcgcgctggacttcctggcctcactgtgggtgcatcgtaagtgggtcgctccgcgctcttcacaaacggcagatgatcgcaggcgtgattgcgcgcactgcgaataaacgcttccgtaactggctgacgctgctcgccatcgcgcacggcggcgtacagtcggctccacaagccttcgcccagggttttggtcaccaccagaccctggcgctcaaaactctctactacccaatgcggtagcgcggcaatacccatccgcgcggcaaccatctgaatcaacaataaggtgttatcgacgcttttcagactcgggctgacgcctgccggctgaagaaaatgccgccagacatccagtcgactacgctgcaccggataaattaatagcgtctcgctggcgagatcttccggtgtaattcgcgttttcgccgccagtggatggtcaggtgctaacaccagacgcacttcatagtcgaacatcgggctataatgcaggccactgcgcggcagaatatcggacgtcattaccagatccagctctccctgttgcaaggcgggctgcgggtcaaatgtcacgccgcttttaaaatccatctctacctgcggccagttcttatggaaattttctaacgcgggtgtcagccactgaatacagctatggcactcaatggcaatgcgcagacgcgtctgctgcggttcattgcaggcttgcagggcctggctaatttgcggcagtacctggtttgccagttgcaacaggatttctccctgcggtgtaaagcgtagcggctggctcttacgcacaaatagccggaagccaaggcgttgttccagatcgctaaactggtgagacagggcggattgcgtctgatgcaacgtcgccgcagcggctgcgaggctgccgcagttccgcaacgcttgtagcgttttcaggtgttttacttcgatcatgaaagtccttcacttcggcatgaataatttgcgcttgaggaatatacagtaaccgccaattatggatgtgtaaacatctggacggctaaaatccttcgtcttttaaatttatggtgcgttggctgcgtttctccaccccggtcacttacttcagtaagctcccggggatgaataaacttgccgccttccctaaattcaaaatccataggatttacatataattagaggaagaaaaaatgacaatattgaatcacaccctcggtttccctcgcgttggcctgcgtcgcgagctgaaaaaagcgcaagaaagttattgggcggggaactccacgcgtgaagaactgctggcggtagggcgtgaattgcgtgctcgtcactgggatcaacaaaagcaagcgggtatcgacctgctgccggtgggcgattttgcctggtacgatcatgtactgaccaccagtctgctgctgggtaacgttccggcgcgtcatcagaacaaagatggtagcgtagatatcgacaccctgttccgtattggtcgtggacgtgcgccgactggcgaacctgcggcggcagcggaaatgaccaaatggtttaacaccaactatcactacatggtgccggagttcgttaaaggccaacagttcaaactgacctggacgcagctgctggacgaagtggacgaggcgctggcgctgggccacaaggtgaaacctgtgctgctggggccggttacctggctgtggctggggaaagtgaaaggtgaacaatttgaccgcctgagcctgctgaacgacattctgccggtttatcagcaagtgctggcagaactggcgaaacgcggcatcgagtgggtacagattgatgaacccgcgctggtactggaactaccacaggcgtggctggacgcatacaaacccgcttacgacgcgctccagggacaggtgaaactgctgctgaccacctattttgaaggcgtaacgccaaatctcgacacgattactgcgctgcctgttcagggtctgcatgttgacctcgtacatggtaaagatgacgttgctgaactgcacaagcgcctgccttctgactggttgctgtctgcgggtctgatcaatggtcgtaacgtctggcgcgccgatcttaccgagaaatatgcgcaaattaaggacattgtcggcaaacgtgatttgtgggtggcatcttcctgcagcttgctgcacagccccatcgacctgagcgtggaaacgcgtcttgatgcagaagtgaaaagctggtttgccttcgccctacaaaaatgccatgaactggcactgctgcgcgatgcgctgaacagtggtgacacggcagctctggcagagtggagcgccccgattcaggcacgtcgtcactctacccgcgtacataatccggcggtagaaaagcgtctggcggcgatcaccgcccaggacagccagcgtgcgaatgtctatgaagtgcgtgctgaagcccagcgtgcgcgttttaaactgccagcgtggccgaccaccacgattggttccttcccgcaaaccacggaaattcgtaccctgcgtctggatttcaaaaagggcaatctcgacgccaacaactaccgcacgggcattgcggaacatatcaagcaggccattgttgagcaggaacgtttgggactggatgtgctggtacatggcgaggccgagcgtaatgacatggtggaatactttggcgagcacctcgacggatttgtctttacgcaaaacggttgggtacagagctacggttcccgctgcgtgaagccaccgattgtcattggtgacattagccgcccggcaccgattaccgtggagtgggcgaagtatgcgcaaagcctgaccgacaaaccggtgaaagggatgctgacggggccggtgaccatactctgctggagcttcccgcgtgaagatgtcagccgtgaaaccatcgccaaacagattgcgctggcgctgcgtgatgaagtggccgatctggaagccgctggaattggcatcatccagattgacgaaccggcgctgcgcgaaggtttaccgctgcgtcgtagcgactgggatgcgtatctccagtggggcgtagaggccttccgtatcaacgccgccgtggcgaaagatgacacacaaatccacactcacatgtgttattgcgagttcaacgacatcatggatagcattgcggcgctggacgcagacgtcatcaccatcgaaaccagccgttccgacatggagttgctggagagctttgaagagtttgattatccaaatgaaatcggtcctggcgtctatgacattcacagcccaaacgtaccgagcgtggaatggattgaagccttgctgaagaaagcggcaaaacgcattccggcagagcgcctgtgggtcaacccggactgtggcctgaaaacgcgcggctggccagaaacccgcgcggcactggcgaacatggtgcaggcggcgcagaacttgcgtcgggggtaaaatccaaaccgggtggtaataccacccggtcttttctcattacaggctcttcttcccaccatactgcttaaaccattccagcatacgctgccagccatcttctgcagatgcggcatgatagctcgggcgataatcagcgttgaatgcatgcccggcgtccgggtacacgataatctctgctttcgcattagcagcccgcagcgcctggcgcatggtttcaacgctctcctgcggaatgctgttatcctgaccaccatataagccgagaatcggcgcgttaagatcggttgcgatatcaacaggttgtttcggactattcaggctcttgtcgcccgtcagtttgccgtaccacgccactgcggcttttagctgtggattatgcgcggcatacagccaggtgatacgtccaccccagcagaatccggtgatcattaaacgatgaacatcgccgccgttgcgggaagcccaactggcgacatgatcgagatcggccagcacctggctgtcaggcacttttgctaccagaccgctaagcaacgtggggatatcggcaaaatcattcggatcgccttcgcggaagtaaagttcaggtgcgatagccagatacccctccagcgccagacggcgacaaatgtcgcggatatgttcatgcacgccaaaaatttcctgcactacaatgaccactggcagtgggccatcgctttgctttggtctggcatggtaagcaggcatgttatccccttgactagggatagaggtgaagcccgccacaatcgcgtcgtccggggtctgaacgatggtgctagcgagagggcttgcagcaggtgcaaatccagattgttgtgttgttgccatggtattctccgtacccttataaaaatgttgcgcaatgttaactatagtcagcatgcaacaaatcacattgcctgaatcggctcatcttttatgcagtcctgcagaatgaagggtgatttatgtgatttgcatcacttttggtgggtaaatttatgcaacgcatttgcgtcatggtgatgagtatcacgaaaaaatgttaaacccttcggtaaagtgtctttttgcttcttctgactaaaccgattcacagaggagttgtatatgtccaagtctgatgtttttcatctcggcctcactaaaaacgatttacaaggggctacgcttgccatcgtccctggcgacccggatcgtgtggaaaagatcgccgcgctgatggataagccggttaagctggcatctcaccgcgaattcactacctggcgtgcagagctggatggtaaacctgttatcgtctgctctaccggtatcggcggcccgtctacctctattgctgttgaagagctggcacagctgggcattcgcaccttcctgcgtatcggtacaacgggcgctattcagccgcatattaatgtgggtgatgtcctggttaccacggcgtctgtccgtctggatggcgcgagcctgcacttcgcaccgctggaattcccggctgtcgctgatttcgaatgtacgactgcgctggttgaagctgcgaaatccattggcgcgacaactcacgttggcgtgacagcttcttctgataccttctacccaggtcaggaacgttacgatacttactctggtcgcgtagttcgtcactttaaaggttctatggaagagtggcaggcgatgggcgtaatgaactatgaaatggaatctgcaaccctgctgaccatgtgtgcaagtcagggcctgcgtgccggtatggtagcgggtgttatcgttaaccgcacccagcaagagatcccgaatgctgagacgatgaaacaaaccgaaagccatgcggtgaaaatcgtggtggaagcggcgcgtcgtctgctgtaattctcttctcctgtctgaaggccgacgcgttcggccttttgtatttttgcgtagcgcctcgcaggaaatgcctttccaactggacgtttgtacagcacaattctattttgtgcgggtaagttgttgcgtcaggaggcgttgtggatttcagtatcatggtttacgcagttattgcgttggtgggtgtggcaattggctggctgtttgccagttatcaacatgcgcagcaaaaagccgagcaattagctgaacgtgaagagatggtcgcggagttaagcgcggcaaaacaacaaattacccaaagcgagcactggcgtgcagagtgcgagttactcaataacgaagtgcgcagcctgcaaagtattaacacctctctggaggccgatctgcgtgaagtaaccacgcggatggaagccgcacagcaacatgctgacgataaaattcgccagatgattaacagcgagcagcgcctcagtgagcagtttgaaaacctcgccaaccgtatttttgagcacagcaatcgccgggttgatgagcaaaaccgtcagagtctgaacagcctgttgagcccgctacgtgaacaactggacggtttccgccgtcaggttcaggacagcttcggtaaagaagcacaagaacgccataccctgacccacgaaattcgcaatctccagcaactcaacgcgcaaatggcccaggaagcgatcaacctgacgcgcgcgctgaaaggcgacaataaaacccagggcaactggggcgaggtagtattgacgcgggtgttggaggcttccggtctgcgtgaagggtatgaatatgaaacccaggtcagcatcgaaaatgacgcccgcagccggatgcagccggatgtcatcgtgcgcctgccgcagggaaaagatgtggtgatcgacgccaaaatgacgctggtcgcctatgaacgctattttaacgccgaagacgactatacccgcgaaagcgcgctacaggaacatatcgcgagcgtgcgtaaccatatccgtttgctgggacgcaaagattatcaacagctgccggggctgcgaactctggattacgtgctgatgtttattcccgttgaacccgcttttttactggcgcttgaccgccagccggagctgatcaccgaagcgttgaaaaacaacatcatgctggttagcccgactacgctgctggtggcgctgcgcactatcgccaacctgtggcgttatgagcatcaaagccgcaacgcccagcaaatcgccgatcgtgccagcaagctgtacgacaagatgcgtttgttcatcgatgacatgtccgcgattggtcaaagtctcgacaaagcgcaggataattatcggcaggcaatgaaaaaactctctagtgggcgcggaaatgtgctggcgcaggcagaagcgtttcgcggtttaggagtagaaattaaacgcgagattaatccggatttggctgaacaggcggtgagccaggatgaagagtatcgacttcggagcgttccggagcagccgaatgatgaagcttatcaacgcgatgatgaatataatcagcagagccgctaacccattgggagtagttaagccgggtagaaatctagggcatcgacgcccaatctgttacacttctggaacaattttttgatgagcaggcattgagatggtggataagagtcaagaaacgacgcactttggttttcagaccgtcgcgaaggaacaaaaagcggatatggtcgcccacgttttccattccgtggcaagtaaatacgatgtcatgaatgatttgatgagttttggtattcatcgtttgtggaagcgattcacgattgattgcagcggcgtacgccgtgggcagaccgtgctggatctggctggtggcaccggcgacctgacagcgaaattctcccgcctggtcggagaaactggcaaagtggtccttgctgatatcaatgaatccatgctcaaaatgggccgcgagaagctgcgtaatatcggtgtgattggcaacgttgagtatgttcaggcgaacgctgaggcgctgccgttcccggataacacctttgattgcatcaccattagctttggtctgcgtaacgtcaccgacaaagataaagcactgcgtagtatgtatcgcgtgctgaaacccggcggccgcctgctggtgcttgagttcagcaagccaattatcgagccgctgagcaaagcctatgatgcatactccttccatgtgctgccgcgtattggcagtctggtcgcgaacgacgccgacagctaccgttatctggcagaatccatccgtatgcatcccgatcaggataccctgaaagccatgatgcaggatgccggattcgaaagtgtcgactactacaatctgacggcaggggttgtggcgctgcatcgtggttataagttctgacaggagaccggaaatgccttttaaacctttagtgacggcaggaattgaaagtctgctcaacaccttcctgtatcgcagtcccgcgctgaaaacggcccgcagccgtctgctgggtaaagtattgcgcgtggaggtaaaaggctttagcacgagtttgattctggtgttcagcgaacgccaggttgatgtactgggcgaatgggcaggcgatgctgactgcaccgttatcgcctacgccagtgtgttgccgaaacttcgcgatcgccagcagcttaccgcactgattcgcagtggtgagctggaagtgcagggcgatattcaggtggtgcaaaacttcgttgcgctggcagatctggcagagttcgaccctgcggaactgctggccccttataccggtgatatcgccgctgaaggaatcagcaaagccatgcgcggaggcgcaaagttcctgcatcacggcattaagcgccagcaacgttatgtggcggaagccattactgaagagtggcgtatggcacccggtccgcttgaagtggcctggtttgcggaagagacggctgccgtcgagcgtgctgttgatgccctgaccaaacggctggaaaaactggaggctaaatgacgccaggtgaagtacggcgcctatatttcatcattcgcacttttttaagctacggacttgatgaactgatccccaaaatgcgtatcaccctgccgctacggctatggcgatacagtttattctggatgccaaatcggcataaagacaaacttttaggtgagcgactacgactggccctgcaagaactggggccggtttggatcaagttcgggcaaatgttaagtacccgccgcgatctttttccaccgcatattgccgatcagctggcgttattgcaggacaaagttgctccgtttgatggcaagctggcgaagcagcagattgaagctgcaatgggcggcttgccggtagaagcgtggtttgacgattttgaaatcaagccgctggcttctgcttctatcgcccaggttcataccgcgcgattgaaaagcaatggtaaagaggtggtgattaaagtcatccgcccggatattttgccggttattaaagcggatctgaaacttatctaccgtctggctcgctgggtgccgcgtttgctgccggatggtcgccgtctgcgcccaaccgaagtggtgcgcgagtacgaaaagacattgattgatgaactgaatttgctgcgggaatctgccaacgccattcagcttcggcgcaattttgaagacagcccgatgctctacatcccggaagtttaccctgactattgtagtgaagggatgatggtgatggagcgcatttacggcattccggtgtctgatgttgcggcgctggagaaaaacggcactaacatgaaattgctggcggaacgcggcgtgcaggtgttcttcactcaggtctttcgcgacagctttttccatgccgatatgcaccctggcaacatcttcgtaagctatgaacacccggaaaacccgaaatatatcggcattgattgcgggattgttggcagcctaaacaaagaagataaacgctatctggcagaaaactttatcgccttctttaatcgcgactatcgcaaagtggcagagctacacgtcgattctggctgggtgccaccagataccaacgttgaagagttcgaatttgccattcgtacggtctgtgaacctatctttgagaaaccgctggccgaaattagctttggacatgtactgttaaatctgtttaatacggcgcgtcgcttcaatatggaagtgcagccgcaactggtgttactccagaaaaccctgctctacgtcgaaggggtaggacgccagctttatccgcaactcgatttatggaaaacggcgaagcctttcctggagagctggattaaagatcaggtcggtattcctgcgctggtgagagcatttaaagaaaaagcgccgttctgggtcgaaaaaatgccagaactgcctgaattggtttacgacagtttgcgccagggcaagtatttacagcacagtgttgataagattgcccgcgagcttcagagtaatcatgtacgtcagggacaaagccgttattttctcggaattggcgctacgttagtattaagtggcacattcttgttggtcagccgacctgaatgggggctgatgcccggctggttaatggcaggtggtctgatcgcctggtttgtcggttggcgcaaaacacgctgattttttcatcgctcaaggcgggccgtgtaacgtataatgcggctttgtttaatcatcatctaccacagaggaacatgtatgggtggtatcagtatttggcagttattgattattgccgtcatcgttgtactgctttttggcaccaaaaagctcggctccatcggttccgatcttggtgcgagcatcaaaggctttaaaaaagcaatgagcgatgatgaaccaaagcaggataaaaccagtcaggatgctgattttactgcgaaaactatcgccgataagcaggcggatacgaatcaggaacaggctaaaacagaagacgcgaagcgccacgataaagagcaggtgtaatccgtgtttgatatcggttttagcgaactgctattggtgttcatcatcggcctcgtcgttctggggccgcaacgactgcctgtggcggtaaaaacggtagcgggctggattcgcgcgttgcgtagtctggcgacaacggtgcagaacgaactgacccaggagttaaaactccaggagtttcaggacagtctgaaaaaggttgaaaaggcgagcctcactaacctgacgcccgaactgaaagcgagcatggatgaactacgccaggccgcggagagcatgaagcgttcctacgttgcaaacgatcctgaaaaggcgagcgatgaagcgcacaccatccataacccggtggtgaaagataatgaagctgcgcatgagggcgtaacgcctgccgctgcacaaacgcaggccagtagcccggaacagaagccagaaaccacgccagagccggtggtaaaacctgctgcggacgctgaaccgaaaaccgctgcaccttcccctagcagcagtgataaaccgtaaacatgtctgtagaagatactcaaccgcttatcacgcatctgattgagctgcgtaagcgtctgctgaactgcattatcgcggtgatcgtgatattcctgtgtctggtctatttcgccaatgacatctatcacctggtatccgcgccattgatcaagcagttgccgcaaggtagtacgatgatcgccaccgacgtggccagcccgttctttacgccgatcaagctgacctttatggtgagcctgattctgagtgcgccggtgattctctatcaggtgtgggcatttatcgccccagcgctgtataagcatgaacgtcgcctggtggtgccgctgctggtttccagctctctgctgttttatatcggcatggcattcgcctactttgtggtctttccgctggcatttggcttccttgccaataccgcgccggaaggggtgcaggtatccaccgacatcgccagctatttaagcttcgttatggcgctgtttatggcgtttggtgtctcctttgaagtgccggtagcaattgtgctgctgtgctggatggggattaccagcccagaagacttacgcaaaaaacgcccgtatgtgctggttggtgcattcgttgtcgggatgttgctgacgccgccggatgtcttcagccaaacgctgttggcgatcccgatgtactgtctgtttgaaatcggtgtcttcttcagtcgcttttacgttggtaaagggcgaaatcgggaagaggaaaacgacgctgaagcagaaagcgaaaaaactgaagaataaattcaaccgcccgtcagggcggttgtcatatggagtacaggatgtttgatatcggcgttaatttgaccagtagccaatttgcgaaagaccgtgatgatgttgtagcgtgcgcttttgacgcgggagttaatgggctactcatcaccggcactaacctgcgtgaaagccagcaggcgcaaaagctggcgcgtcagtatagctcctgttggagtacggcgggcgtacatcctcacgacagcagccagtggcaagctgcgactgaagaagcgattattgagctggccgcgcagccagaagtggtggcgactggtgaatgtggtctcgactttaaccgcaactttagcacgccggaagagcaggaacgcgcttttgttgcccagctacgcattgccgcagatttaaacatgccggtatttatgcactgtcgcgatgcccacgagcggtttatgacattgctggagccgtggctggataaactgcctggtgcggttcttcattgctttaccggcacacgcgaagagatgcaggcgtgcgtggcgcatggaatttatatcggcattaccggttgggtttgcgatgaacgacgcggactggagctgcgggaacttttgccgttgattccggcggaaaaattactgatcgaaactgatgcgccgtatctgctccctcgcgatctcacgccaaagccaagttcccggcgcaacgagccagcccatctgccccatattttgcaacgtattgcgcactggcgtggagaagatgccgcatggctggctgccaccacggatgctaatgtcaaaacactgtttgggattgcgttttaaagtttgcggaactcggtattcttcacactgtgcttaatctctttattaataagattaagcaatagcatggagcgagcctcaccatcgggttcggtgaaaatggcctgaaagccttcgaacgcgccttcggtaataatcaccttatcacccggataaggggttgccggatcgacaatgtctttcggtttatatacgcttagctgatgaataaccgcgcttgggactatcgctgggctcgcgccaaagcgcacgaagtggctgacaccgcgggtcgcgttgatagtcgtggtatgaatcacttctgggtcaaattccacaaacaggtagttggggaacaatggctcactgactgcagtacgttttccacgcacgattttttccagggtgatcatcggtgccaggcaattcacagcctgtctttcgaggtgttcctgggcacgttgaagttgcccgcgcttgcagtacagtaaataccaggattgcataatgactcttatccgtttaatcggggcgcaaggatagcaaaagctttacgctaagttaattatattccccggtttgcgttataccgtcagagttcacgctaatttaacaaatttacagcatcgcaaagatgaacgccgtataatgggcgcagattaagaggctacaatggacgccatgaaatataacgatttacgcgacttcttgacgctgcttgaacagcagggtgagctaaaacgtatcacgctcccggtggatccgcatctggaaatcactgaaattgctgaccgcactttgcgtgccggtgggcctgcgctgttgttcgaaaaccctaaaggctacagtatgccggtgctgtgcaacctgttcggtacgccaaagcgcgtggcgatgggcatggggcaggaagatgttagcgcgctgcgtgaagttggtaaattattggcgtttctgaaagagccggagccgccaaaaggtttccgcgacctgtttgataaactgccgcagtttaagcaagtattgaacatgccgacaaagcggctgcgtggtgcgccctgccaacaaaaaatcgtctctggcgatgacgtcgatctcaatcgcattcccattatgacctgctggccggaagatgccgcgccgctgattacctgggggctgacagtgacgcgcggcccacataaagagcggcagaatctgggcatttatcgccagcagctgattggtaaaaacaaactgattatgcgctggctgagccatcgcggcggcgcgctggattatcaggagtggtgtgcggcgcatccgggcgaacgtttcccggtttctgtggcgctgggtgccgatcccgccacgattctcggtgcagtcactcccgttccggatacgcttagtgagtatgcgtttgccggattgctacgtggcaccaagaccgaagtggtgaagtgtatctccaatgatcttgaagtgcccgccagtgcggagattgtgctggaagggtatatcgaacaaggcgaaactgcgccggaagggccgtatggcgaccacaccggttactataatgaagtcgatagtttcccggtatttaccgtgacgcatattacccagcgtgaagatgcgatttaccattccacctataccgggcgtccgccagatgagcccgcggtgctgggtgtcgcactgaacgaagtgtttgtgccgattctgcaaaaacagttcccggaaattgtcgatttttacctgccgccggaaggctgctcttatcgcctggcggtagtgacaatcaaaaaacagtacgccggacacgcgaagcgcgtcatgatgggcgtctggagcttcttacgccagtttatgtacactaaatttgtgatcgtttgcgatgatgacgttaacgcacgcgactggaacgatgtgatttgggcgattaccacccgtatggacccggcgcgggatactgttctggtagaaaatacgcctattgattatctggattttgccagccctgtctccgggctgggtagtaaaatggggctggatgccacgaataaatggccgggggaaacccagcgtgaatggggacgtcccatcaaaaaagatccagatgttgtcgcgcatattgacgccatctgggatgaactggctatttttaacaacggtaaaagcgcctgatgcgcgtttgttttgccctatttatcgatccgacagagaaagcgcatgacaaccttaagctgtaaagtgaccagcgtagaagctatcacggataccgtatatcgtgtccgcatcgtgccagacgcggccttttcttttcgtgctggtcagtatttgatggtagtgatggatgagcgcgacaaacgtccgttcagtatggctagcacgccggatgaaaaagggtttatcgagctgcatattggcgcttctgaaatcaacctttacgcgaaagcagtcatggaccgcatcctcaaagatcatcaaatcgtggtcgacattccccacggagaagcgtggctgcgcgatgatgaagagcgtccgatgattttgattgcgggcggcaccgggttctcttatgcccgcagcattttgctgacagcgttggcgcgtaacccaaaccgtgatatcaccatttactggggcgggcgtgaagagcagcatctgtatgatctctgcgagcttgaggcgcttagcttgaagcatcctggtctgcaagtggtgccggtggttgaacaaccggaagcgggctggcgtgggcgtactggcaccgtgttaacggcggtattgcaggatcacggtacgctggcagagcatgatatctatattgccggacgttttgagatggcgaaaattgcccgcgatctgttttgcagtgagcgtaatgcgcgggaagatcgcctgtttggcgatgcgtttgcatttatctgagatataaaaaaacccgcccctgacaggcgggaagaacggcaactaaactgttattcagtggcatttagatctatgacgtatctggcaaaccatgcccgatgcgacgctgtcgcgtcttatcgtgcctacaaatagtccgaaccgtaggccggataaggcgtttacgccgcatccggcaattggtgcatgatgcctgatgcgacgctgtcgcgtcttatcgtgcctacaaatagtccgaaccgtaggccggataaggcgtttacgccgcatccggcaattggtgcatgatgcctgatgcgacgctggcgcgtcttatcaggcctacattggtgccggatcggtagaccggataaggcgttcacgccgcatccggcaagtggttaaacccgctcaaacaccgtcgcaataccctgacccagaccgatacacatcgtcgccagaccaaactgaacgtctttgcgttccatcagattcagcagcgtggtgctgatacgcgcaccggaacaacccagcggatgacccagcgcgatcgcgccaccgttgaggttgatcttctcgtcaatctgctcaattagtcccagatctttaatacatggcaggatctgcgcggcaaaggcttcgttcatttcaaacacgccgatatcgctggcagaaagccccgcttttttcagcgccagtttgctggccggaaccgggccgtaacccataatgcttgggtcacaaccaacgaccgccatgctacgcacacgagcgcgcggcttaagacctaattcatgggcgcggctttcactcatcaccagcatggcagctgcgccatcggaaagtgcagaagatgtgcccgccgttaccataccgtttactggatcaaacgccggacgcagcgtggcgagggcttccacggtggtttccgggcgaatcacttcgtcgtaattaaactgcttcaggacgccgtcggcatcgtgaccaccggtcgggatgatttcatttttaaatgcggcgctctgcgtggcggcccaggcgcgggcgtgactccgcgcggcaaaggcatcctgcatttcacggctgataccgtgcatacgcgccagcatttctgccgttaagcccatcatgcccgccgctttggcgacattgcggctcaggccggggtgaaaatcgacgccgtgactcatcggcacatggcccatatgctccacgccgccaaccagacatgcctgcgcatcgccagtcatgatcattcgtgctgcgtcatgcagtgcctgcatggaactaccacacaagcgattaacggtaaccgccgggacagagtgtggtacttctgccagcagcgccgcgttacgggcgatattaaaaccctgctccagcgtctgctgcacacaaccccagtaaatatcgtcgagggccgccgcttccagcgccgggttacgcgccagcaggctacgcattaaatgagcggagagatcttctgcacgcacgttacgaaaagcaccgcccttgctacggcccatcggggtgcgaattgcatcgacaatgacaacctgttccattgtgactccttaagccgttttcaggtcgccaaccggacgggctggctcaaccggaggatagtacggttcgttatgacgcgctttattacgcagaccttccggcacttcatacagcgggccgaggtgctgatattgctgtgccatatcgaggtattttgcgctaccgagggtgtccagccagcggaacgcgccgccgtggaacggagggaagcccaggccgtagaccagcgccatatccgcttccgccggagtggcgataatgccttcctccagacagcgcaccacttcgttgaccatcgggatcatcatgcgggcgataatctcttcttcgctgaagtcgcgcttcggctggctcacttctgccagcaggtcttcaacggcggcgtcttcttctttcttcggcttacctttgctgtcttctttataacgccagaaaccgaggccgttcttctgaccaaagcggttggcatcaaacagcgcgtcgatggcatcgcggtaatctttctgcatccgctgcgggaagcctgctgccatgacagcctgagcgtgatgcgcggtatcaatgcccacaacgtccagcagatatgccgggcccatcggccagccaaactgtttttccatcactttgtcgatcttgcggaaatccgcgccgtcgcgcagcagctggctgaaaccggcgaaatacgggaacagcacgcggttaacaaagaagccggggcagtcgttaaccacaatcggcgtcttgcccatcttgctcgcccaggcgacaactttcgcgatggtttcgtcggagcttttctcgccgcgaataatttctaccaacggcattcggtggaccgggttaaagaagtgcatcccgcagaagttttccgggcgttccagcgcgttggccagttcgctgataggaatggtactagtgttagacgccagcacggtatcctggcgtactttttgttcggtttctgccagtacggcttttttcactttcgggttttcaacaaccgcttctaccacaatatccacgcggtcaaatccggcgtagtcgagcgttgggtggattgtggagatcacgccagccagtttcagaccatcgatcttgccgcgctcaagctgcttgttcagcagtttcgcggcttcggtcatgccgagggttaagctcttgtcgttgatatctttcatgacaaccggcacgcctttccacgcagactggtaagcgatgccgccgcccataatgcctgcacccagcaccgcggcctgtttcggggtttcaacgtctttggtgagtttcttcgctttgccttttacatattgatcgttaaggaaaatgccgaccagtgcgcgggcttcgttggtatgcgccagcgggacaaaacttttgttttccaggtttaaggcttcttcacgaccaaaacgggccgcagcttcaatggtttttactgcggtgatgggggccggataatgtttccccgctgtttgtgcgaccatccctttagcgatggtgaagctcatggtggcttcaatcttgctcagttttagtggttccagcttcggctgacgttttgctttccagtcgaggtcgccgttaatggcctggcgtaaaaccgcctttgcgccttcaaccagtttttctgctttgactacgccatccaccagaccgattttcagcgcctgatccgcgccgacatctttaccggcggcaatgatttccagcgcactgtcagcgcccagcatacgtggcatacgtacagaaccgccaaagccaggcatgatgcccagtttggtttccggcagaccgatgcgcagatccggcgtcgccagacgataatcggtcgccagcacgcattcgcagccaccgcccagcgcatagccattgacggcagcaatggtcggcaccggcagatcttccaggcgattaaacacgctattggcaaagtgcagccactgacttaactgttcttcaggaacgaggaacagggacaaaaattcggtgatatcagcaccgacgataaaggctgctttgttgctacgcagcagcagcccttttagatcactttgctgttccagcacgccgatggcctcgccgaggctggcgacggtcgcagtgtcgagtttattaacactacctggggcatcaaataccagttcggcaatgccatcttccagccagtcaaggtacagggtgtcgcctttgtaaagcatgtcagtctcctgaatccgcaaggtgatctggtcgtaccagatgagtcgaagtgtgtattttgtgttaaaaatatgcaaacaaaagattaaagaaatgccgatctgatcacgctcggcagaaatcacgctctggatgaacgatgtgctaagatgcggagacttaaggtcaaaaaaacagaagggtaaaaaatggaaagtctggccagcctctataaaaatcatatagctaccttacaagaacggactcgcgatgcgctggcgcgcttcaagctggatgcgttacttattcactccggcgagctgttcaatgtttttctcgacgatcatccctatccgtttaaagtgaacccgcaattcaaagcgtgggtgccggtaactcaggtgccaaactgctggttgctggtggatggcgtgaacaagccgaaactgtggttctatctgccggttgattactggcacaacgtcgaaccgctgccgacctctttctggactgaagatgtggaagtgatcgcgctgccgaaagccgatggcattggtagcctgctgcctgctgcgcgcggcaatatcggttatatcggtccggtgccggaacgtgcgctgcaactgggtattgaggccagcaacatcaacccgaaaggggttatcgactacctgcattactatcgctccttcaaaactgagtacgaactggcctgtatgcgtgaagcgcagaaaatggcggtcaacggtcaccgcgcggcagaagaagcgttccgttctggcatgagcgagttcgatatcaacattgcctatctgaccgcgaccggtcatcgtgataccgacgtaccttacagcaacattgtggcgcttaacgaacacgctgcggtactgcattacaccaaactggaccatcaggcaccggaagagatgcgcagcttcctgctggatgccggggcagaatataacggctatgcggctgacctgacccgtacctggagcgcaaaaagtgacaacgactacgcgcagctggtgaaggacgttaatgatgaacaactggcgctgatcgccaccatgaaagcaggcgtcagctatgtggattaccacatccagttccatcagcgcatcgccaaactgctgcgtaaacatcaaatcatcaccgatatgagtgaagaagcgatggtcgaaaacgatcttaccgggccgtttatgccgcatggtatcggccatccgctgggcctgcaggtgcatgacgtcgctggttttatgcaggatgatagcggtacgcacctcgcggcaccggcaaaatatccgtacctgcgctgcacccgtattctccagccgggcatggtgttaaccatcgaaccgggtatctacttcatcgaaagcctactggcaccgtggcgtgaagggcagttcagcaagcacttcaactggcagaaaattgaagcactgaaaccgttcggcggcattcgtatcgaagacaacgtggtgatccacgaaaacaacgtggaaaacatgacccgggatctgaaactggcgtgatggaaagctggttaattcctgcggcaccggtcacggtcgttgaagagatcaaaaagagccgcttcataacgatgttggcgcataccgatggcgttgaggcggcgaaagcgtttgttgaaagcgtgcgggcagaacaccccgatgcccggcaccattgcgtggcgtgggtcgcgggtgcgccggatgattctcaacagctgggtttctctgacgacggggagccggcgggaacggcaggtaaaccgatgctcgcccagctaatgggcagcggcgtcggggaaattaccgctgtggtagtgcgctactacggcggcatattgcttggcaccggtgggttagtgaaagcgtatggcggcggcgtgaatcaggcgctgcgccagctaacgacccaacgcaagacgccattaaccgaatatactttgcaatgtgaatatcatcagttaaccggcattgaagcgttgctggggcagtgtgacggcaaaattatcaacagtgattatcaggcattcgttctgctgcgggtggcgcttccggcggcgaaagtggctgaattttccgcaaagctggcggattttagccgtggtagtttgcaattgttagcgattgaagaataatccccacttcgttttgcagaactaaggaagcggcagagatgcattttcgcgccattacccgaatcgttggactactggtcatcttatttagtgggaccatgattatccctgggctggtagcactcatctaccgggatggagcgggccgcgcttttacccagaccttttttgtcgccctcgccattggctctatgctgtggtggccgaaccgcaaagagaaaggcgaacttaaatcccgtgaggggtttctgatagtggtgctgttctggaccgtgctgggtagcgtcggtgcgctcccttttatcttcagcgaaagcccgaacctcacgattaccgatgcgttttttgaatctttctctggcctgaccactacgggagccactacgctggtggggctggatagcctccctcacgccatcctcttttatcgccagatgctgcaatggtttggcgggatggggatcatcgtgttggcggttgcgatactgcctatcctcggcgtgggtgggatgcagctctatcgcgcagaaatgcccggcccgctgaaagataacaaaatgcgcccgcgaattgcggaaacggcgaaaaccctgtggttgatttatgtcttgctgaccgtcgcctgtgcgctggcgttgtggtttgccggaatggatgcctttgatgccatcggccatagctttgcgactatcgctattggcggcttcagcacacatgatgccagtatcggttatttcgatagcccgactattaacactatcattgctatcttcctgctgatctccggctgtaactacggtctgcactttagtctgttaagtgggcgtagtctgaaggtttattggcgcgatccggaatttcgcatgtttatcggcgtacagtttacgctggtggttatttgtaccctcgtactgtggtttcataatgtctacagtagcgcgctgatgacaattaaccaggcgtttttccaggtggtgagcatggcgacaaccgccgggtttacaactgacagcattgcccgctggccgctctttttgccggtactgcttttatgtagtgcctttatcggcggttgcgccgggagtacgggcggtggcctgaaggtgatccgcatcctgctgctgtttaagcaggggaaccgtgagctgaaacgactggtgcatccgaacgccgtctatagcattaagctggggaatcgcgcactgccggaacgtatcctcgaagccgtttggggatttttctccgcctatgcattggtgtttattgtcagtatgctggcgattatcgccacgggcgtggatgacttttctgcctttgcgagcgttgttgcgacattgaataacctggggccagggcttggcgtggttgctgataactttaccagtatgaacccggtggctaaatggatcctgattgccaacatgctgtttggtcgtctcgaggtctttacattgctggtgctctttaccccgactttctggcgtgaatgatggagtaatacgtgaaaacattaattcttttcagtacaagggacggacaaacgcgcgagattgcctcctacctggctagcgaactgaaagaactggggatccaggcggatgtcgccaatgtgcaccgcattgaagaaccacagtgggaaaactatgaccgtgtggtcattggtgcttctattcgctatggtcactaccatagtgcgttccaggaatttgtcaaaaaacatgcgacgcggctgaatagcatgccgagcgccttttactccgtgaatctggtggcgcgcaaaccggagaagcgtactccacagaccaacagctacgcgcgcaagtttctgatgaacagccaatggcgtcccgatcgctgcgcggtcattgccggggcgctgcgttacccacgttatcgctggtacgaccgttttatgatcaagctgattatgaagatgagtggcggtgaaacggatacgcgcaaagaagttgtctataccgattgggagcaggtggcgaatttcgcccgagaaatcgcccatttaaccgacaaaccgacgctgaaataagcataaagaataaaaaatgcgcggtcagaaaattattttaaatttcctcttgtcaggccggaataactccctataatgcgccaccactgacacggaacaacggcaaacacgccgccgggtcagcggggttctcctgagaactccggcagagaaagcaaaaataaatgcttgactctgtagcgggaaggcgtattatgcacaccccgcgccgctgagaaaaagcgaagcggcactgctctttaacaatttatcagacaatctgtgtgggcactcgaagatacggattcttaacgtcgcaagacgaaaaatgaataccaagtctcaagagtgaacacgtaattcattacgaagtttaattctttgagcgtcaaacttttaaattgaagagtttgatcatggctcagattgaacgctggcggcaggcctaacacatgcaagtcgaacggtaacaggaagaagcttgcttctttgctgacgagtggcggacgggtgagtaatgtctgggaaactgcctgatggagggggataactactggaaacggtagctaataccgcataacgtcgcaagaccaaagaggggtaccttcgggcctcttgccatcggatgtgcccagatgggattagctagtaggtggggtaacggctcacctaggcgacgatccctagctggtctgagaggatgaccagccacactggaactgagacacggtccagactcctacgggaggcagcagtggggaatattgcacaatgggcgcaagcctgatgcagccatgccgcgtgtatgaagaaggccttcgggttgtaaagtactttcagcggggaggaagggagtaaagttaatacctttgctcattgacgttacccgcagaagaagcaccggctaactccgtgccagcagccgcggtaatacggagggtgcaagcgttaatcggaattactgggcgtaaagcgcacgcaggcggtttgttaagtcagatgtgaaatccccgggctcaacctgggaactgcatctgatactggcaagcttgagtctcgtagaggggggtagaattccaggtgtagcggtgaaatgcgtagagatctggaggaataccggtggcgaaggcggccccctggacgaagactgacgctcaggtgcgaaagcgtggggagcaaacaggattagataccctggtagtccacgccgtaaacgatgtcgacttggaggttgtgcccttgaggcgtggcttccggagctaacgcgttaagtcgaccgcctggggagtacggccgcaaggttaaaactcaaatgaattgacgggggcccgcacaagcggtggagcatgtggtttaattcgatgcaacgcgaagaaccttacctggtcttgacatccacggaagttttcagagatgagaatgtgccttcgggaaccgtgagacaggtgctgcatggctgtcgtcagctcgtgttgtgaaatgttgggttaagtcccgcaacgagcgcaacccttatcctttgttgccagcggtccggccgggaactcaaaggagactgccagtgataaactggaggaaggtggggatgacgtcaagtcatcatggcccttacgaccagggctacacacgtgctacaatggcgcatacaaagagaagcgacctcgcgagagcaagcggacctcataaagtgcgtcgtagtccggattggagtctgcaactcgactccatgaagtcggaatcgctagtaatcgtggatcagaatgccacggtgaatacgttcccgggccttgtacacaccgcccgtcacaccatgggagtgggttgcaaaagaagtaggtagcttaaccttcgggagggcgcttaccactttgtgattcatgactggggtgaagtcgtaacaaggtaaccgtaggggaacctgcggttggatcacctccttaccttaaagaagcgttctttgaagtgctcacacagattgtctgatgaaaatgagcagtaaaacctctacaggcttgtagctcaggtggttagagcgcacccctgataagggtgaggtcggtggttcaagtccactcaggcctaccaaatttgcacggcaaatttgaagaggttttaactacatgttatggggctatagctcagctgggagagcgcctgctttgcacgcaggaggtctgcggttcgatcccgcatagctccaccatctctgtagtgattaaataaaaaatacttcagagtgtacctgcaaaggttcactgcgaagttttgctctttaaaaatctggatcaagctgaaaattgaaacactgaacaacgaaagttgttcgtgagtctctcaaattttcgcaacacgatgatgaatcgaaagaaacatcttcgggttgtgaggttaagcgactaagcgtacacggtggatgccctggcagtcagaggcgatgaaggacgtgctaatctgcgataagcgtcggtaaggtgatatgaaccgttataaccggcgatttccgaatggggaaacccagtgtgtttcgacacactatcattaactgaatccataggttaatgaggcgaaccgggggaactgaaacatctaagtaccccgaggaaaagaaatcaaccgagattcccccagtagcggcgagcgaacggggagcagcccagagcctgaatcagtgtgtgtgttagtggaagcgtctggaaaggcgtgcgatacagggtgacagccccgtacacaaaaatgcacatgctgtgagctcgatgagtagggcgggacacgtggtatcctgtctgaatatggggggaccatcctccaaggctaaatactcctgactgaccgatagtgaaccagtaccgtgagggaaaggcgaaaagaaccccggcgaggggagtgaaaaagaacctgaaaccgtgtacgtacaagcagtgggagcacgcttaggcgtgtgactgcgtaccttttgtataatgggtcagcgacttatattctgtagcaaggttaaccgaataggggagccgaagggaaaccgagtcttaactgggcgttaagttgcagggtatagacccgaaacccggtgatctagccatgggcaggttgaaggttgggtaacactaactggaggaccgaaccgactaatgttgaaaaattagcggatgacttgtggctgggggtgaaaggccaatcaaaccgggagatagctggttctccccgaaagctatttaggtagcgcctcgtgaattcatctccgggggtagagcactgtttcggcaagggggtcatcccgacttaccaacccgatgcaaactgcgaataccggagaatgttatcacgggagacacacggcgggtgctaacgtccgtcgtgaagagggaaacaacccagaccgccagctaaggtcccaaagtcatggttaagtgggaaacgatgtgggaaggcccagacagccaggatgttggcttagaagcagccatcatttaaagaaagcgtaatagctcactggtcgagtcggcctgcgcggaagatgtaacggggctaaaccatgcaccgaagctgcggcagcgacactatgtgttgttgggtaggggagcgttctgtaagcctgtgaaggtgtgctgtgaggcatgctggaggtatcagaagtgcgaatgctgacataagtaacgataaagcgggtgaaaagcccgctcgccggaagaccaagggttcctgtccaacgttaatcggggcagggtgagtcgacccctaaggcgaggccgaaaggcgtagtcgatgggaaacaggttaatattcctgtacttggtgttactgcgaaggggggacggagaaggctatgttggccgggcgacggttgtcccggtttaagcgtgtaggctggttttccaggcaaatccggaaaatcaaggctgaggcgtgatgacgaggcactacggtgctgaagcaacaaatgccctgcttccaggaaaagcctctaagcatcaggtaacatcaaatcgtaccccaaaccgacacaggtggtcaggtagagaataccaaggcgcttgagagaactcgggtgaaggaactaggcaaaatggtgccgtaacttcgggagaaggcacgctgatatgtaggtgaagcgacttgctcgtggagctgaaatcagtcgaagataccagctggctgcaactgtttattaaaaacacagcactgtgcaaacacgaaagtggacgtatacggtgtgacgcctgcccggtgccggaaggttaattgatggggttagccgcaaggcgaagctcttgatcgaagccccggtaaacggcggccgtaactataacggtcctaaggtagcgaaattccttgtcgggtaagttccgacctgcacgaatggcgtaatgatggccaggctgtctccacccgagactcagtgaaattgaactcgctgtgaagatgcagtgtacccgcggcaagacggaaagaccccgtgaacctttactatagcttgacactgaacattgagccttgatgtgtaggataggtgggaggctttgaagtgtggacgccagtctgcatggagccgaccttgaaataccaccctttaatgtttgatgttctaacgttgacccgtaatccgggttgcggacagtgtctggtgggtagtttgactggggcggtctcctcctaaagagtaacggaggagcacgaaggttggctaatcctggtcggacatcaggaggttagtgcaatggcataagccagcttgactgcgagcgtgacggcgcgagcaggtgcgaaagcaggtcatagtgatccggtggttctgaatggaagggccatcgctcaacggataaaaggtactccggggataacaggctgataccgcccaagagttcatatcgacggcggtgtttggcacctcgatgtcggctcatcacatcctggggctgaagtaggtcccaagggtatggctgttcgccatttaaagtggtacgcgagctgggtttagaacgtcgtgagacagttcggtccctatctgccgtgggcgctggagaactgaggggggctgctcctagtacgagaggaccggagtggacgcatcactggtgttcgggttgtcatgccaatggcactgcccggtagctaaatgcggaagagataagtgctgaaagcatctaagcacgaaacttgccccgagatgagttctccctgactccttgagagtcctgaaggaacgttgaagacgacgacgttgataggccgggtgtgtaagcgcagcgatgcgttgagctaaccggtactaatgaaccgtgaggcttaaccttacaacgccgaaggtgttttggcggattgagagaagattttcagcctgatacagattaaatcagaacgcagaagcggtctgataaaacagaatttgcctggcggcagtagcgcggtggtcccacctgaccccatgccgaactcagaagtgaaacgccgtagcgccgatggtagtgtggggtctccccatgcgagagtagggaactgccaggcatcaaataaaacgaaaggctcagtcggaagactgggcctttcgttttatctgttgtttgtcggtgaacgctctcctgagtaggacaaatccgccgggagcggatttgaacgttgcgaagcaacggcccggagggtggcgggcaggacgcccgccataaactgccaggcatcaaattaagcagaaggccatcctgacggatggcctttttgcattggcgcagaaaaaaatgccggatgcgacgctggcgcgtcttatccagcctactcttgcttatccgttctgcttttgcatccactccaccacaaaatcagccagcccctcaacatcattaatatccagtaatgcgacatcaagattaagcggcacatcactggctacagcaataacatgcctgtctatcactaattcttcaggtcgatgtccggctccatcgcgaaacagcacaatctttgcgatctcttcatgcttaaacccttcgaccagaatcaaatccagcttactggtatccattcgacttgcgagaaactgtagatccagctcttcttcgtctggtgtttccgtcatcaaggcccatcgttgctggctggcaacgatggtttgtaccgcgccagccttgcgcagctcatagctatctttgcctggcttatcaacatccatatcatggtgcgtatgcttaatcagccctggacggatccctctggcgcataatgccgggatcagttttttcaaaagcgtagtttttccggtaccactccacgcggcaaaggcgagtaacggtatcatcgtttttcctgccatcgggcaagctcctctggcgtattcacgttaacaaatgcatctttatgatcgctgaaatcaaccgcatgaccgccagccagacgcataaataccattacccggcgttctcctgcttgcagatattccagtaataaaggctcaatagcgcggtttaccagagcaatagtcgggtgatcgcgttcaccgtcatggacccacacgacaggcgcatctttgcgctgatgattaagcctggctgctaaatcagggggaatgtaaggcgtatcgcacgggcaaaacaaaaaccactcaccagcttcctgctgcattacactaagcattcctgccagagggcctgggtaatccgccagactatcttcaatcactttcagaccgcttgcctgatagatttcctgatgacgattagcattaaccacgacgtgagagagctgcgtcataagcgcgtcagcgacatgttgccataatggtttgccgtttaattcaagcaatcctttatctacgccgcccattcgtctggctttaccgcctgccagcacaacgcctgttatcgtcgtcatcagattcaccgatatcgcctcttttattgtgggattgaccctgctaacgtgtctgtctcaagagtaaggagcatcactatgaaatgtaaacgtctgaatgaagttattgaactcctccagccagcctggcaaaaagagccagaccttaacctgctgcaatttttgcagaaactggcgaaagagagtggttttgacggcgaactggcggatttgacggatgacattctgatctatcacctgaaaatgcgtgattccgcgaaagatgcggtgatcccgggtttgcagaaagattatgaagaagacttcaaaacggcgctgttacgcgctcgcggcgtaattaaagagtaaaagcttgtaagcggcgccaccaaaatcatcgtgaaatgatatccttcgtcattcgtaatgttttccggatgatgggatgaataacagcgcttttactttccagacactacacccggataccatcatggacgctctgtttgagcatgggatccgggtggattccggtcttaccccgcttaacagctatgaaaaccgtgtctatcaatttcaggacgaagatcgtcgacgttttgtcgtcaaattttatcgccctgaacgttggacagccgatcaaatcctcgaagaacatcaatttgcgttgcagctggtaaatgatgaagttccggtcgcagcacctgtggcctttaacggtcagactttattgaatcatcagggattttatttcgctgtttttccaagcgtcggtggtcgccagttcgaagctgataatatcgatcagatggaagcggttgggcgttatttagggcgtatgcaccagacggggcgcaaacagctttttatccatcgcccgaccatcggtttgaacgaatatctcattgagccacgcaagctgtttgaggacgctacactgataccttccgggttgaaagcggcattcctgaaagcgacagatgagctgattgccgccgttacagcacactggcgggaagatttcaccgttctgcggctacatggagactgccacgccgggaatattctctggcgcgatggtccaatgtttgttgatctggatgatgcacgtaatggtccagccgttcaggatttgtggatgttgctcaatggcgataaagccgagcagcggatgcaactggaaactattattgaagcttatgaagaatttagcgagttcgacaccgctgaaatcggactgattgaacctttacgcgccatgcgtttggtttattatcttgcctggctaatgcggcgttgggctgatcccgcgttcccgaaaaatttcccgtggttaaccggggaagattactggctgcgacagacggcgacttttatagaacaggcaaaagttctacaagaaccccctttgcaattaacacctatgtattaatcggagagagtagatcatgaaaaagatttggctggcgctggctggtttagttttagcgtttagcgcaagcgcggcgcagtatgaagatggtaaacagtacactaccctggaaaaaccggtagctggcgcgccgcaagtgctggagtttttctctttcttctgcccgcactgctatcagtttgaagaagttctgcatatttctgataatgtgaagaaaaaactgccggaaggcgtgaagatgactaaataccacgtcaacttcatgggtggtgacctgggcaaagatctgactcaggcatgggctgtggcgatggcgctgggcgtggaagacaaagtgactgttccgctgtttgaaggcgtacagaaaacccagaccattcgttctgcttctgatatccgcgatgtatttatcaacgcaggtattaaaggtgaagagtacgacgcggcgtggaacagcttcgtggtgaaatctctggtcgctcagcaggaaaaagctgcagctgacgtgcaattgcgtggcgttccggcgatgtttgttaacggtaaatatcagctgaatccgcagggtatggataccagcaatatggatgtttttgttcagcagtatgctgatacagtgaaatatctgtccgagaaaaaataattcaatgtaaattacataaagcccgtgaatattcacgggctttttttattatttaataaatataaatacattctgataatgcatcctgccgctggacattatttcagcataagtggatattcaaagttttgctgttttatcagggaatatttatatgatacgtaagagtgctacaggtgttattgttgcgttagccgtaatctggggtggtggcacatggtacacaggtacgcaaattcagcctggtgtcgaaaaatttattaaagattttaacgatgctaaaaagaaaggtgaacatgcctacgatatgacgttaagttatcaaaattttgacaaaggcttttttaattcccgttttcaaatgcaaatgacattcgataacggtgcacccgatctcaatatcaagccaggccagaaagttgtatttgatgtggatgttgagcacggtccgttgcccatcacaatgttaatgcatggtaatgtcatcccagcactggcagcggcaaaagtgaacttagtgaataatgaactgacacaaccgctatttatcgccgcgaaaaataaaagccccgtggaagcgacattgcgattcgcgtttggtggcagtttctctacgacattagatgttgcccctgcagagtatggaaagttttcttttggtgagggccagtttacttttaatggtgatggtagtagtttgtctaacctggatattgaaggcaaagtcgaagatattgttctgcaattaagtccaatgaacaaagtaacggcaaaaagttttaccattgattctctggcgcgattagaagaaaagaaatttccggttggtgaaagcgagagcaaatttaatcagattaacattatcaatcacggggaagacgttgcccaaatcgatgctttcgttgcaaaaaccaggctggatcgcgttaaagacaaagattatatcaatgtcaatctcacctacgaacttgataagttaacaaaagggaatcagcaactcggtagtggtgagtggagtttgattgctgaatctattgatcccagtgcagtgcgccaatttatcatccagtataacattgcgatgcagaagcagcttgctgcacaccctgagttagcaaacgatgaagttgctctgcaagaagtgaatgctgcattgttcaaagagtatttaccgttattacaaaaaagtgagccgaccattaaacaaccggtaagatggaagaacgcactcggcgaactaaatgccaatctggatatcagtattgccgacccagccaaatctagtagttccacaaacaaagatatcaaaagcctcaattttgatgtgaagttaccgcttaatgtcgtcacagaaaccgcaaaacagcttaatttatctgaaggaatggatgcggaaaaagcgcaaaagcaggctgataaacaaatcagcgggatgatgacattaggtcagatgtttcagttaatcacgattgacaacaataccgccagcctgcagctgcgttatacaccgggtaaagttgtttttaacggacaggagatgagcgaagaagaatttatgtctcgtgccggacgttttgttcattaaaatactcactcgcctctgctcattcagaggcgagtaaaacttacttattctgacgctgactactcatgagagacgtcagaagccggtctttttcctgccacaaactgttcagccattgctgaaaatggcgcttaaagcttttgtcattgatgtagtcgccatgtaactcatcggcaataggctgtaaatccacatgtacgacaatccgcgtcagtttaccgcttaacatatcgaagaacggctgacggttattgtccggataacacagcgtaacattaagcagtttatcgaattgtttacccagtacatttagcgccatcgcaatgcctgccgcctttggtggcaacaagttttgaaaagtggagtgggtttgctgatgtttttcttgcgtgaaacgggagccttcaacgaaattgacaatggtggtgggatgcaggcgaaacttttcacaagaacgccgagtggtttcaacatctttaccacgtcgctccggatgacgtaataaataagcgcgggaataacgcttcataaacggcatatccaggctccagcacgccaggccaagaaatggcacccaggccagctgttgcttgaggaaatatttattcatcggaatgtgcttacgaaacagcacgcacagtacgacaacatctgcccaactacggtggttacaaataagcagataccagttcttcttacttaacccttccagcccgtgaacttcccattgaaggtgtgggttcagatgcagtaataccgccagaccttcacaccagcaatacatcataaaatcacaaaaacggctaacctttcgccaaatgactggcacaggtagcaatagttttacaatcccggcaatgatgatcgggacggaacaaaaaatagtgaccaaaatggtcaatacgatactcagcaaaagggttatcgcagcgagtattctcgtcataatgaatttattcaaaaggttagccatagacagtgcgctaaagaagcgcaaggcgcagattttagcagaaaacgacccaaataacggatgatccttaaggagaaaaataattcatatctatccacattagaaaaaatcccattatctcaattattagggatggatttatttttaactgcatgaaaaacaaagacaaacatcatgctgtaaaaagcatgataataaattaaaagcgatgtaaataatttatgcacaaagttatccacatgacgatttgcgagcgatccagaagatctacaaaagattttcacgaaaagcggtgaaaaactcatgttttcatcctgtctgtggcatcctttacccataatctgataaacaggcacggacattatggttcagatcccccaaaatccacttatccttgtagatggtagttcttatctttatcgcgcatatcacgcgtttcccccgctgactaacagcgcaggcgagccgaccggtgcgatgtatggtgtcctcaacatgctgcgcagtctgatcatgcaatataaaccgacgcatgcagcggtggtctttgacgccaagggaaaaacctttcgtgatgaactgtttgaacattacaaaagtcatcgcccgccaatgccggacgatctgcgtgcacaaatcgaacccttgcacgcgatggttaaagcgatgggactgccgctgctggcggtttctggcgtagaagcggacgacgttatcggtactctggcgcgcgaagccgaaaaagccgggcgtccggtgctgatcagcactggcgataaagatatggcgcagctggtgacgccaaatattacgcttatcaataccatgacgaataccatcctcggaccggaagaggtggtgaataagtacggcgtgccgccagaactgatcatcgatttcctggcgctgatgggtgactcctctgataacattcctggcgtaccgggcgtcggtgaaaaaaccgcgcaggcattgctgcaaggtcttggcggactggatacgctgtatgccgagccagaaaaaattgctgggttgagcttccgtggcgcgaaaacaatggcagcgaagctcgagcaaaacaaagaagttgcttatctcagttaccagctggcgacgattaaaaccgacgttgaactggagctgacctgtgaacaactggaagtgcagcaaccggcagcggaagagttgttggggctgttcaaaaagtatgagttcaaacgctggactgctgatgtcgaagcgggcaaatggttacaggccaaaggggcaaaaccagccgcgaagccacaggaaaccagtgttgcagacgaagcaccagaagtgacggcaacggtgatttcttatgacaactacgtcaccatccttgatgaagaaacactgaaagcgtggattgcgaagctggaaaaagcgccggtatttgcatttgataccgaaaccgacagccttgataacatctctgctaacctggtcgggctttcttttgctatcgagccaggcgtagcggcatatattccggttgctcatgattatcttgatgcgcccgatcaaatctctcgcgagcgtgcactcgagttgctaaaaccgctgctggaagatgaaaaggcgctgaaggtcgggcaaaacctgaaatacgatcgcggtattctggcgaactacggcattgaactgcgtgggattgcgtttgataccatgctggagtcctacattctcaatagcgttgccgggcgtcacgatatggacagcctcgcggaacgttggttgaagcacaaaaccatcacttttgaagagattgctggtaaaggcaaaaatcaactgacctttaaccagattgccctcgaagaagccggacgttacgccgccgaagatgcagatgtcaccttgcagttgcatctgaaaatgtggccggatctgcaaaaacacaaagggccgttgaacgtcttcgagaatatcgaaatgccgctggtgccggtgcttagtcgcattgaacgtaacggtgtgaagatcgatccgaaagtgctgcacaatcattctgaagagctcacccttcgtctggctgagctggaaaagaaagcgcatgaaattgcaggtgaggaatttaacctttcttccaccaagcagttacaaaccattctctttgaaaaacagggcattaaaccgctgaagaaaacgccgggtggcgcgccgagtacgagcgaagaggtactggaagaactggcgctggactatccgttgccaaaagtgattctggagtatcgtggtctggcgaagctgaaaagcacctacaccgacaagctgccgctgatgatcaacccgaaaaccgggcgtgtgcatacctcttatcaccaggcagtaactgcaacgggacgtttaagcagtaccgatcctaacctgcaaaacattccggtgcgtaacgaagaaggtcgtcgtatccgccaggcgtttattgcgccagaggattatgtgattgtcagtgcggactacagccagattgaactgcgcattatggcgcatcttagccgtgacaaaggcttgctgaccgcattcgcggaaggaaaagatatccaccgggcaacggcggcagaagtgtttggtttgccactggaaaccgtcaccagcgagcaacgccgtagcgcgaaagcgatcaactttggtctgatttatggcatgagtgctttcggtctggcgcggcaattgaacattccacgtaaagaagcgcagaagtacatggacctttacttcgaacgctaccctggcgtgctggagtatatggaacgcacccgtgctcaggcgaaagagcagggctacgttgaaacgctggacggacgccgtctgtatctgccggatatcaaatccagcaatggtgctcgtcgtgcagcggctgaacgtgcagccattaacgcgccaatgcagggaaccgccgccgacattatcaaacgggcgatgattgccgttgatgcgtggttacaggctgagcaaccgcgtgtacgtatgatcatgcaggtacacgatgaactggtatttgaagttcataaagatgatgttgatgccgtcgcgaagcagattcatcaactgatggaaaactgtacccgtctggatgtgccgttgctggtggaagtggggagtggcgaaaactgggatcaggcgcactaagattcgcctgaacatgccttttttcgtaagtaagcaacataagctgtcacgttttgtgatggctattagaaattcctatgcaacaactgaaaaaaaattacaaaaagtgctttctgaactgaacaaaaaagagtaaagttagtcgcgtagggtacagaggtaagatgttctatctttcagaccttttacttcacgtaatcggatttggctgaatattttagccgccccagtcagtaatgactggggcgttttttattgggcgaaagaaaagatccgtaatgcctgatgcgctatgtttatcaggccaacggtagaattgtaatctattgaatttacgggccggatacgccacatccggcacaagcattaaggcaagaaaattattcgccgtcctgcgtttcttctacaggctgcatctcgctaaaccaggtatccagtttctgccgcagcttgtccacgccttgtttcttcaagctagaaaacgtttcaacctgcacatcaccgttaaacgccagtacagcttcacgcaccatattcaattgcgctttacgtgcgccgcttgccagtttgtccgctttggtcagcagcaccagaacggcgatattgctgtctaccgcccactcaatcatctgctgatccaaatctttcagcggatggcgaatatccattagcaccaccagaccttgcaggctctgacgtttttcgaggtattcgccgagcgcacgctgccatttgcgcttcatctcttccgggacttccgcataaccgtacccaggcaagtcaaccagacgcttgccgtcagccacttcaaacaggttgataagctgggtgcgccctggggttttactggtacgagccaggcttttctggttagtcagcgtgttcagcgcgctggatttacctgcgttggaacggcctgcaaaagccacttcaattccggtatcggaaggtaggtggcgaatatcaggcgcactcatcacaaaatgcgtctgttgataattcaaattagtcaaagcggtcgtctccgtcagtcaaagctttgtggcgattatacctgaaccataataaaaggcggatttttcggcgtgagcgttgtaagtaaaagccatacgctttgtgagacattgccgatagtctttatgcgaaatagcagagaaaattctgcgatgcatgtcaaataagctatataaatcagtgaattgcttttatataaaactctgaaaatgtgcaaatactgatggcggttgattgtttgtttaaagcaaaggcgtaaagtagcacccatagagcgaggacgctaacaggaacaatgactcaggatgagggtcaggagcgccaggaggcgaagacagaggattgtcaggaagacaaacgtccggagacgtaattaaacggaaatggaatcaacacggattgttccggctaaaggaaaaacagggtgtgttggcggcctgcaaggattgtaagacccgttaagggttatgagtcaggaaaaaaggcgacagagtaatctgtcgccttttttctttgcttgctttctgttagattccgccgcaaatctatactgaataaaacggctaaaagacgaaccattatgaaaccaagttctagtaacagtcgcagcaaaggtcatgcaaaagcgcgtcgaaaaacacgcgaggagctggatcaggaagctcgtgatcgcaagcgtcagaaaaaacgtcgtggtcatgcgccgggcagccgcgcagcgggcggaaacaccacgagtggcagcaaaggccagaacgcaccaaaagatccacgtattggcagtaaaacccctattccattgggcgtgactgaaaaagtcaccaaacagcacaaaccgaagagtgagaaacctatgcttagtccgcaggcggagttggaattactggaaacggatgagcgtctggatgcgctgctggaacgtctggaagcaggcgaaaccctgagtgccgaagagcaatcctgggtggatgctaaactggatcgtattgatgagttgatgcagaaactcggcctctcttatgacgatgacgaagaagaggaagaagacgagaagcaagaagacatgatgcgtctgctgcggggcaactaacggattgccgccgtgggccttcccgttctgctgataacccttccggttatatgttatctggtgtggttattcgttaaactacagcggttgtcgcggcgacaaaagtggctgcgcaaccggctgatgacccgaaacgggcatccgccggtacgccgtagccgccagagacgccatcggaaggagtgagcatgtctgtacagcaaatcgactgggatctggccctgatccagaaatataactattccgggccacgatacaccagctacccgaccgcgctggagtttagtgaagacttcggcgaacaggcgtttttacaagccgtggcgcgctatcctgagcgtccattatctctctacgtacatatcccgttctgccataagctttgttacttctgcggttgcaataagattgttactcgccagcagcacaaggccgatcagtatctggacgcgctggagcaagaaatcgtccatcgtgcaccgctgttcgccgggcgtcacgtcagccaattgcactggggcggcggaacgccgacgtatctgaataaagcgcaaatcagccgcctgatgaagctgctgcgcgaaaacttccagttcaatgccgatgcggagattagcatcgaagtcgatccgcgggaaatcgaactggatgtactcgatcatttacgcgccgaaggctttaatcgcctgagcatgggcgtgcaggacttcaacaaagaagtgcaacgtctggttaaccgcgagcaggatgaagagttcatctttgcactgcttaaccatgcgcgtgagattggttttacctccaccaacatcgacctgatttacggcctgccgaaacagacgccggagagtttcgcctttaccctgaaacgtgtggcggagctgaaccccgatcgtctgagtgtctttaactacgcgcatctgccgaccatttttgctgctcagcgcaaaatcaaagatgctgacctgccgagtccgcagcaaaaactcgatatcctgcaggaaaccatcgccttcctgacgcaaagcggctatcagtttatcggtatggatcactttgcccgtccggatgacgagctggcggtggcccagcgtgaaggcgtgctgcatcgtaacttccagggctacaccactcagggcgataccgatctgctggggatgggcgtttccgccatcagcatgattggcgactgctacgcgcagaaccagaaagagttgaagcagtactatcagcaagtggatgaacaaggcaatgcgctgtggcgtggtattgcgctaacgcgtgatgactgtattcgccgcgatgtgattaagagcctcatctgcaacttccgtctggattacgcccctattgagaaacagtgggatttgcacttcgctgattactttgcggaagatctcaagctgctcgccccgttagcaaaagatgggctggtggatgtggatgagaagggaatacaggtgacggcgaaaggtcgcttgctgatccgcaacatttgcatgtgctttgatacctatctgcgccagaaagcgcggatgcagcagttctctcgggtgatttaaatagtgaatggcgcttcgtttacaaagtagaaaacgaaagcgccatcaatgtgctgagaacaagattgcctgatgcgctgggcaacaaaacctgttgaaattattgcttttgtaggccggataaggcgtttacgccgcatcaggcatctgagcatgatgcctgatgcggcgctggtcgcgtcttatcaggcctacgactttctccgcatccggcataaacaacgagcttcagctaaacagcccaatcattgcggcacacagcacggcagcaacggcagtttgcggtgtgtggctgtcaactgcgccactcgataccagattaattattgattccagcataatgactctccccgttttccgggcaagatcatactgaacttatcggaacagtaaagcgtaaaataccagcaatttgcgctcaataatcaatctttacacacaagctgtgaatcactccatccccagctcttttaacttacgcgtcagggtgttgcggccccagccgagtagccgcgccgcttcctgtttatgcccctgcgtatgtcgcaacgcggtcgtcagtaacgtccgctccagctctggctgcgcttcggaaagcagattttgatgaccggaacgcagcgctctgtctgcccactgcgcaagaagcgtcgcccagctgtccggttgcatttggctagtactctccgcaaccgtactttcaaacagttcgccgggcaaatcctgaatcaacacttcctgcccggcggccatcaccgttagccagcggcaggtgttttccagctggcgcacgttgcctggccacgccagacgcgtcagagcagcttcggtttccggatgcagtaacttcgcttctacgcccagttcgcgcgcggcaacctgtaaaaaatggcgcgccagacggggaatatcttcccgacgttcgcgcagcggcggcagatgaacgcggataacgttcaggcggtggaacagatcctcacggaacttaccttcctgcactcgctgttcgagattctggtgagtggcagcgataatccgcacatccactttcaccggcgcatagccgccaacgcggtaaaactgaccgtctgccagcacgcgcagcaaacgcgtctgcacatccagcggcatatcaccaatttcgtcgaggaataatgtaccgccatcggcctgttcaaaacgcccctgacgaatggtattcgcgccagtaaacgcgcctttctcgtggccaaacagttcactttcgatcaaatcttttgggatagctgccatattcagcgcgataaacggcgctttggcgcgcggactgtggcgatgcagggcatgagcgaccagttctttaccggtgccggattcgccgttaatcagcacgctaatagaagaacggctaagccgaccgataatacggaacacgtcctgcatggctggcgcttcgccgatgatatcggtcgttgggccgttaagctgaacattacgcggctgctgctgttcctggtaatgactgatagcgcgctcaaccagcgccactgcttcgtcgatatcaaacggtttgggcagataatcaaacgccccttgttgataggcgctgacggcagcatccagatcggaatgtgcggtcataatgatgaccggaagcattggatggcgctgtttaatctgcttgagcagcgccagcccgtccattcccggcatacggatatcactaagcagcacatccggcgttttgctcgccagcgcctccagcacttctgcgccgttctcaaacgtcgtacaggttaaacctgccccagcgagcgcacgttcaagcacccaacggatggaactatcgtcatcgactacccagactatccctcgttgcataaacgtcacctttatttcctgataggcaggtaaacgctgaactcggtatgccctggccaactggtaaattcaattttgccactatgctgatcaatcaaattacgagcgatggataagccaagcccggtgccaccttcgcggccgctgaccatcgggtaaaacagcgtatcctgcaaatgaggcggaatgcccggcccgttatcttccacatcaatccgcgccgccagccggtagcgctcgccgtgtaaggtcagttgaaacgcggtgcgggtacgcagaatgatttcaccgccttccggccccagcgcctgtagcgcattgcgcacaatattcagcaagacctgttcaatttgatccgggtcgtgcgccagttccggtaggctgggatcgtaatcacgaatcaaccgcacgttgtccggcagttccatgctcaccagcgttaccacgcgttcagccactttgtgaatactttcggtaacgcgcgtaccgggcagctgcggccccaacagacggtcgaccagatttcgcagccggtccgcctgttcgataatcactttggtatattcgagtagacttgggtcaggtaacgctttgctgagcagctgcgccgcgccacgtaaaccgccaagcggatttttaatctcatgtgccaggccgcgcactaaatcacgggcagcaacctgctgggcgtgctgtagctgttcctgacttaagcggcgctggttatccatcggagccatctccagcaggatcatgccgtccggcatacgctgggccgtcacagaaaggatatggctgcgcccgtcgatgaccagcgtcacttcgttatcggtaaaaccttgccccgcctccagactttcttgcatcagctcgatatttaaactgaagtagctcaacagttccggtaacggtgtaccaaacaatttgcgggagctttgggcgagcagttgttgcgcggcagggttggcgtaatggatcgccaggttgtcatcgattaacaaaatactgttaatcaggctgttgaggatctgcccagcatcgggctgcgtgcctgttgccataaagcagtctcctgaacaggttgcaccattttagtgcattatagctttttacggataaaaagcgcgaagcatcagagaattgacggagaaaaaagcccatgcagagatgggctacagatagctgacaaacttcacgttggagagcgactcacctgctccggcctaccacatcatcaccgtgtaggccggataagacgcatttgcgtcgcatccggcgtgatgtgcttgccaccgatcccaggcctgccagagacaggcgaaaagtttccacggcaactaaaacacttagacgctgtagtacagctcaaactctaccggatgcggagtcatacgcacgcggtcatcttcttcgcgacgcagagcgatgtacgcatcaattgcttcgtcagtgaacacgccaccggctttcaggaactcgcggtccagatccagttcgttcagtgcttcttccagagagcctgcaacctgtgggatctctttcgcttcttctggcggcaggtcatacaggtttttgtccatggcttcgcccggatggatcttgttcttgataccatcaagaccggccatcagcagggcagcaaagcacaggtacgggttagctgccggatccgggaaacgtacttcgatacgacgtgctttcggagaagaaaccaccggaatacggatagacgcagaacggttacgcgcagagtaagccagcattaccggtgcttcatagcccgggaccagacgcttataagagttggtggtcgggtttgccagggcgttaatcgctttagcgtgtttgattacgccgccaatgtagtacagcgcctgctcagacagacctgcgtatttgtcgcctgcgaacaggttaacgccgtttttagacagagacatgtggcagtgcataccggagccgttatcaccgaacatcggttttggcataaaggtcgcggttttaccgaagcggtgcgctacgttgtgcacaacatatttgtagatctgaatttcgtcagcttttttggtcatggtattgaagcgggtagccacttcgttctgaccagcagtcgctacttcgtggtgatgggcttcaaccaccagacccatctgttccatcaccagacacatttcagaacgaatatcctgagcgctgtctaccggtggaaccgggaagtaaccgcctttcactgccggacggtgacctttgttaccaccttcgtattgggtggaggagttccatgcgccttcgatatcgtcgatagcaacgtgggaaccggagatagaacttccgaaacggatgtcatcgaacaggaagaattcaggttctggcccgaacagtacggtgtcggcaatgccagtggaacgcaggtaatcttcggcgcgcttcgcaatggagcgcgggtcacggtcatagccttgcagggtgccaggttcaaggatgtcgcaacggataatcagggtggagtcggcgaagaacgggtcaatcactgcggtggatgcgtctggcatcagcaccatgtcggactcgttaatgcctttccagccgccaatgctggagccgtcaaacattttgccttcttcgaagaattcagcattcacctgatgagcagggatagtgacgtgctgttctttacctttagtatcggtgaagcgcaaatcaacaaacttcacttcgtgctcgttcagcatcgtcagtacgtgttcagcggacatactttaactctcctggattggtcatggtcgtcgtggtaacgaaatctgcaattattttggccgtgtcgccgtaaaaaagataaagcgaaatctgtgccaacttttaaattgcccctaaaaggcgttatcatgcgcaccatcgtgcaaaagggctgcaccacgatgtgaatgttgcaccaatatagtgcttcaatggaaacattaagcaccatgttggtgcaatgacctttggataaccctttttatgctccgtgaaagcgatcacaaagggactctgcaatacttgtttgcggaggatgtttgtgatcctgttttgtagtgcgattaatccgtgtacaataacgcgctatttctaatgcctgaggcaaagttgtgatcgaaaaattgcgtaatatcgccatcatcgcgcacgtagaccatggtaaaaccaccctggtagacaagctgctccaacaatccggtacgttcgactctcgtgccgaaacccaagagcgcgtgatggactccaacgatttggagaaagagcgtgggattaccatcctcgcgaaaaacaccgctatcaaatggaatgattaccgtatcaacatcgttgataccccggggcacgccgacttcggtggtgaagttgaacgtgtaatgtccatggtagacagtgtgctgctggtggttgacgcatttgacggcccgatgccgcaaacgcgcttcgtaaccaaaaaagcgtttgcttacggcctgaagccgattgttgttatcaacaaagttgaccgccctggcgcgcgtcctgattgggttgtggatcaggtattcgatctgttcgttaacctcgacgcgaccgacgagcagctggacttcccgatcgtttacgcttctgcgctgaacggtatcgcgggtctggaccacgaagatatggcggaagacatgaccccgctgtaccaggcgattgttgaccacgttcctgcgccggacgttgaccttgacggtccgttccagatgcagatttctcagctcgattacaacagctatgttggcgttatcggcattggccgcatcaagcgcggtaaagtgaagccgaaccagcaggtcactatcatcgatagcgaaggcaaaacccgcaacgcgaaagtcggtaaagtgctgggccacctcggtctggaacgtatcgaaaccgatctggcggaagctggcgatatcgttgcgatcacgggccttggcgaactgaacatttctgacaccgtttgcgacacgcaaaacgttgaagcgctgccggcactctccgttgatgagccgaccgtttctatgttcttctgcgttaacaccagcccgttctgcggtaaagaaggtaagttcgtaacgtctcgtcagatcctggatcgtctgaacaaagaactggtacacaacgttgcgctgcgcgtagaagaaaccgaagacgccgatgcgttccgcgtttctggtcgtggcgaactgcacctgtctgttctgatcgaaaacatgcgtcgtgaaggtttcgaactggcggtatcccgtccgaaagttatcttccgtgaaatcgacggtcgtaaacaagagccgtatgaaaacgtgactctggacgttgaagaacagcatcagggttctgtaatgcaggcgctgggcgaacgtaaaggcgacctgaaaaacatgaatccagacggtaaaggccgcgtacgtctcgactacgtgatcccaagccgtggtctgattggcttccgttctgagttcatgaccatgacttccggtactggtctgctgtactccaccttcagccactacgacgacgtacgtccgggtgaagtgggtcagcgtcagaacggcgtactgatctctaacggtcagggtaaagcggtcgcgttcgcgctgttcggtctgcaggatcgcggtaagctgttcctcggtcacggtgcagaagtttacgaaggtcagattatcggtattcatagccgctctaacgacctgactgtaaactgcctgaccggtaagaaactgaccaacatgcgtgcttccggtactgacgaagccgttgttctggttccgcctatccgcatgactctggaacaagctctggagttcatcgatgatgacgaactggtagaagtgactccgacctctatccgtattcgtaaacgtcacctgacggaaaacgatcgtcgccgcgccaaccgcgcaccgaaagacgattaatttcgttttttagtcataaaaaacctgccagcgatggcaggtttttttttgcctgtcgtgagcgcacaccaatgcgagtatctcccttataagtctgtggttacgtcaatagagagctttgtcacaattatctgcaaagtcatacgccgttaattgctttcttttttggcgtaagcgtaagatgcttcatctggtttaaaccaaaaggattaaacaatggcggagaatcaatccaccgtagaaaatgcaaaagagaaactggatcggtggttgaaagatggcatcaccacgccgggtggaaaactccctagtgaaagagagctgggagaactgctgggcattaaacgtatgacgctgcgccaggcgttgttgaacctcgaggcagaatccaaaatcttccgtaaggatcgtaaggggtggttcgtgacccagccgcgatttaattacagtccggagctgagcgcgagctttcagcgggccgcaattgagcaagggcgagagccttcctgggggtttaccgagaaaaaccgtaccagcgatattcccgagacgctcgcgccactgattgcagtgacgccaagtactgaactctatcgcatcaccggctggggggcgctggaaggacataaagttttctatcacgaaacatatattaatcctgaagttgctccgggctttattgaacaacttgaaaaccacagtttttctgcagtctgggaaaagtgctaccaaaaagagacggtagtaaaaaaattgattttcaaacccgtcagaatgccgggcgatatcagcaagtatcttggcggttctgcgggtatgccagcgatcttaattgaaaagcatcgcgccgaccagcaaggcaatattgtccaaatagatattgaatattggcgatttgaggccgtagacctcatcattaatctgtaagtgttttatggtgacaataaataacgcaagaaagattctacaacgtgtcgacactcttcctctttatttacatgcttatgcctttcatttaaatatgcggctggaaagagtgttgcctgctgatttacttgatatcgcaagtgaaaataatctacgtggcgtcaaaatccatgttctcgatggcgagcgtttttctcttggtaatatggacgataaagaactctctgcctttggggataaagcccgccgtctgaaccttgatattcatattgaaaccagcgccagtgataaggcatctattgacgaagccgtcgccatcgcgttgaaaactggggcaagctccgtacgtttttatccacgttatgaaggtaatttgcgcgacgtattaagcattatcgctaacgacattgcctatgtacgggaaacgtatcaggacagcggcctgacttttacgatcgagcagcatgaagatttaaaaagtcatgagctggtgagcctggtcaaagaaagtgagatggaatctctttccttactgtttgattttgcgaacatgatcaatgcaaatgagcatcccatcgacgctttaaaaacgatggcaccgcatattacccaggtccatatcaaagatgccttgatcgttaaagaaccgggtggcctgggtcataaagcctgtattagtggtcagggtgatatgccgttcaaagcgttattaacgcaccttatctgcctgggtgatgatgagccgcaggtgacggcatatggcctggaagaagaggttgattactatgcgccggcgttccgctttgaagacgaagatgataatccgtggatcccttatcgccagatgagtgaaacaccattgccagaaaatcatttactggatgcgcggttacgtaaagaaaaagaagatgcaattaatcagataaatcatgtgcgtaacgtactacaacaaatcaaacaagaggcaaaccatcttctgaaccactaataagttttaactcatacgcagttaataaaaccattccatatgaatggtcggtatcttattgcctttaaaacagtgattttaaaaatcgcttaggggatgttatgctcacgaaaaagaaatgggcgttatttagtctattaacactgtgtggcggtacaatttataaattaccgagcctgaaagatgcgttttatatcccgatgcaggaatatttccatttgaccaatggtcaaattggtaatgctatgagcgtaaacagttttgtcaccacagtgggcttttttctgtctatttattttgccgataaactaccgcgcagatacaccatgagtttcagtctcattgcgacaggattactgggtgtttatttgacgacaatgccggggtattggggcatcctctttgtctgggcgctatttggcgttacttgcgacatgatgaactggccggtcttgctcaagagcgtaagtcgattgggcaatagcgaacaacaaggtcggttgtttggcttcttcgaaacagggcgtggcattgtcgataccgtggtggcattttctgcgttggcagtatttacctggtttggcagtggcttattaggttttaaagcaggcatctggttctattcccttattgtgattgccgtaggcattattattttctttgtcctgaatgacaaagaagaggcaccgtccgttgaggtgaaaaaagaagacggagcaagcaaaaacaccagtatgaccagcgtgctgaaagacaaaactatctggcttatcgcttttaacgtcttcttcgtttacgcggtttactgtggcctgacattcttcattccattcctgaaaaacatctatctattgcccgttgcgctggtgggggcttacggcatcattaaccaatactgtctgaaaatgattggtggaccgattggtggcatgattagtgataagatcctgaaaagcccaagtaaatatctatgctacacctttatcattagtaccgctgcgctcgtactgttgattatgctgccgcacgaaagtatgccggtctatttagggatggcatgtacgctgggctttggcgcgatagtctttacacagcgagccgtattttttgcacctatcggcgaagcaaaaattgctgaaaataaaacaggtgcggcgatggcgttgggtagctttattggttacgctccggcgatgttctgcttcagtctgtatggctacattctggatttaaatccggggattattggctacaaaatcgtgtttggcattatggcctgcttcgcattcagtggtgcggtggtttccgtaatgctggttaagcgtattagccaacgtaagaaagagatgctggcggctgaagcttaattaatggccggatgtgcttaatccggccaacgaaaaccgtatcaaccgtaggccggataaggcgtttacgccgcatccggcagtttcacatcagaagaaatacttcgtcccgatacggatctggttttgctcgcggtggtacggttcgacgttgcggtctaaccagcgcaattcgaaataagggagccagtgttcattaatacggtaacggaaggtgttagtgatttcccaatgatgatctttcccgttgctactattaaagtcattcactcgcatgaagtaatgtggctcaaatgtataggaaaatttatcggtgattttaaaattccagtaggtgccaatttcataggtgtcattattatccagttccccgctcaaatctgtactactatagttattatggttatagcgatttcgtactgtcagattaaaccatggtacaaatttatagttgacgtccagatacactgcaccaccgctaccgatactcttatcattaattaagccaccgggctggatggttaatttatcggttggtttaaataacggataccagccttcaatttcgttatatccatgttttagttcatcttctcgctgaaagttgtaggtattggttaacataatacccgcgcccatatcgaagttataacccacacgtagcataacctcgccctgatcggaggcaagattatatgcctccctgttttcgacgtatgcgccagcaaatacgctggcagaggtcagagaagataataaaattattgcattaatctttttcataataagtccattttttaaacgtagggaggccgccacccaccaggatggaaatagcggctattgacatttataacgttacggaagccgttttttcttctgtcgccatctctttatttttgcgttggttgatttcctcaataatcaatgcaaaccgtttttcattgagtgtgtaaaagaatcccatcgtcaatgcagcaataattgccagtgcacaaggccagataaaaatgagctgacgcaaaccctgtaatgtcgcatcgctttgcgcgatgttgggaacataaccaatttgcgtcagcataatgcctggcaagaagccagcaagtgcggcagaaattttacgaaagaaggtataaccggtataaacagaaccttcggcacgaataccggttttccattcaccgtaatctacggtatctggtaccagtgcccagttcaggctgtttacaaaggccgtgccaaaaaaggcgacacaagagaacatgacgaaagtgaaagagttacttccccagaaataattcagtatatcacccaccgcccacagcaccatgccagccagataaacctgttttttaccaaaacattttacagttaatggcaccagtaatacgccgatgaggatgcatcccatactgaagaatcccatccagctcaataaattaatatcattcagcacatactgggtgtaatagacctgaatcgccagtttgatattaaatgccgccagggtacacaagttagcaatgcataaaaccagcaatggcggattccgaaatatcgcgcaaaaacttttgagaatactggctttatgtccggttggcgttgtgtccacataatgctctttgacgcctctgtagcacagcatcataaaaataaagccgccaatggagaacataagtgccgcacaggcataaccgacggtactgtcagaaaaaaggctctgcaacggaataaacgccacggtacaaatcaatagccctatggttgcaccaccctggcggtaagccgcgagctgcgcgcgctcattcgggtttttggtaattgccgggatcatcgcaccatagctgcagttcatcagactgtaactaagtccaaacatcataaacagcgcggtggcaatcgtcgttttaaccggcaaacaaaaggtggtggcgataaactggagcgttgcaattaacgccgccggaaccgctgcatataaaataaagggacgaaatttgcctttaggcccaatatttttccggctgtcgagtaaaaatccggtgagcatatcggtaaacgcggtaaaaaacttcgccaccagaaagataatcccgccatagtaagcaggcatccctaattcatcggtataaaatttgaggagatacagagtaccgatgcagagcattaaattgctaccgacgtcgcccataccataggcgattttttcccgcagattcagttttaatgtcagtggattatggtcagacataatcactccttataacgccccgcagggcgtcgtttattattattacgccgtgcgtttacgggcttctatctcttccacaatgcggacatacatcttctcgttcaggctgtagaagcaacccatcgccacaatggtgactaccgccagtgcgcttgggtagatgaagatcaactggcgtaacccttcaatggtgtggtcagcctgtgcgacgttcggcacatagccaatttgcgtcagcatccagccggggaagaaaccagccagcgcctgagacactttgcgaaagaaggtaaaaccggtgtagaccgttccttcgctacgcacgccggtgcgccactcgccgtactcgacggtgtcggaaaccagcgcccagttcaggctgttaacaaacgcactgccaaagaacgccaggcaggagaacgccacgaagctgacgctaccgccgccgaagaaatagttgagcagatcgcccagcacccaaatcagcaggccgccgatataaactttcttcttgccaaaacgtctgacactggcaggcatcaggaatacgccgatgaaaatacagcccatgctgaaaaatcccatatagctcaacaggatgggatcgttaagcacgtactgggtgtaatagacctggatggcgagcttgacgttaaacgcccctaaagtgcagaggttggcaatgcacagaatgaacagcgggcggttacccgcaattgcgcggaaagattgcagcaggcccggcttttgcgccggattagcaggctgggtttcgacataacgctctttcacgccgctgtagcagatccacataaacagcaggccaaacagactaaacagcgtggcggcgaagatatagccaagttgctgattaccttcgataagattcataactggcacgaatcccaccgtgcacagcagcaggcccagcgtagcgccgccctgacgccatgccgccagactggcgcgttcgttggggtttttggtgatagcgggaaccattgcgccgtaggagcagttcatcatgctgaaaaacagtccgtaaagcataaacagaatagtggccatcaccgttttaccggtgacatcaaacggtgtgccgacaaagttggcgatcgccagtaaggtgaccgggaaactcgcatacagaataaaaggacggaacttaccttttggaccgatcttgcgtcgggaatccaacataatgccggtacccatatcggtaaacgcagtaaagaatttactaatcaaaaagataatgccgccataggtgcctggcagccccagaacgtcggtataaaacttcaaaagataaagcgtaccgatatccagcaggatgttagaggccaggtcgccaataccgtaagagagtttctctttaaagggcaggcgtaaagttgctggatcttccgttgtgatgtgactcatgcttgttctccctttgcccatgagtttccccacgggcggatgtgattagatgctttttaagctcgcgaacagtgccgcccattcgctatcggcgcgataaaagaccggcggcttgccgatgggcgcattaacggtaacttccccgccccggaacgcttcacccgtccaggcgtggacccagttatcctccggcagatagagcgtccagtcgctacggccttcttcatgcaccggagcgaccagaatgtcgcgacctaacaggtactgatatttcagggtgtaagtgtgcgcatcgtcttcgtaatgcaggaacagcgggcgcataaccggcaggccggacttcgcattcagcgcgacggcctctttcaggtaaggtttcagggtggtgaagacggtggtcatacgggcgaaatgggcgatggtttctgcgtcgccgtcaaactgccagttgtcgccaggacggttaccttcgtgggtgcgcatcatcggcgtgaaggcgctgaaatcgcaccagcgcagcagcagctctttgctgcgcttcatctcaaacagggtggtgtaaccgccaatgtcgctgtggtgcaggccatgtccggtcattgccaggctcagcgccgccgggacaacgctcgccaggccatcgtcgagactccagtcgacgttctggtcgcccgcccacatcatggtggagtatttctggctaccggtagaaccggcgcgcataaagaaaaggatctcgccgagcttgcccgtttcttcaagggcttcgtagttacacttcgcccacagcgcaggccaggcgttatgcataatttcggcactgacgccgttatgcaagtacgtgtcggtgggcagatactcgccgaagtcagccatccagccgccgcagccgagttcaatcatgttctttttgatcacttccttgaaccaggcgtaggcttctggattagtgagatcgacaacgccgccgtaaaactcgccaaactccaccagatagtcaccgccagaggcatcttttgccagatagccgtgttgtgccgcttcttcgcagagatctttatcgctggcaacatacgggttgatataggccaggaactgcacgccctcctgattccactgcttaatgcgactatccagttgcgggtagttttcgctgttccacttccagttccacatcacgcgtttgccaaaagaggtcatacgaataccggaccagtcctgcgcccagatgccgttgaccttcacgcccgcgttacgcatggtgtccagtttcttctggcacacttccgtcccgccctgaatgccgagcgttactccgtcataaatccagtcgggcagttctggctggcgtcccagcagggcggttaatttttccagcagggaaatgtatgtgtcagcacattcaaaacgcagcgttgctttgtcttcccacagcgccagttcatggtattccggggcactaaagtcgaagttcatatagcaactgttatcaacatggcagtaatacttctgcgtgctgacaaacgtaggctgtgggaagaaagtccagtaatagtcgccgcccgcattttctttgcagtcggcctgccaggtgacataggtttgtttgttgcgaccaacgccttgttcactggtccatagcgggaacggtttgccacgcagatcgaagtaggaaaactgttcgccgcagccgtagatatggtcctctggttgagcggcaaggcgcagccagatacggttgtggttaaggttgtcgttttgtagttccagcaataaacgcccctgatcgtcggcagagatattcagcgtggcgctaatgtcagaaccacggctgaaatgaattaaccaaccatccggactctggctgacgatggcgtcggtaagcgcaattttctcctgtagtttatctttaatgctgaaattaccgcggaacatatcgatatccgctataccactgccaatccataaacaaggattatctttgctatgggttaaaataagacgttgttgaaaatgtagggtaaaactgtcgttattctgatgaaattgaaaatctaataactgtggacgtggcgtatccataactaatctccatagagttgagaacgagattgttgccttcctgttattacaggcttatgtaaaatgattctcataaaactgatatataaaaactttacagaagctgagctgtttttaacttaataaattgaagatacataatgttgcctttagcgagtgaaatgttcttcaatgattttgactgctaatcaatacaagttattttctctgtccgtaaatattaaaaaacaggcggtgcggttttccactttccagtaataataagtcgataccactattaaaggcgttaggcgggcaactcataggttcaactgccagtccctgacgctgtaatttttcaccgctataaacctgcacccagagttgatcggaacaaaggcttacgctaagcgcctgctgtggatgggtaatggtcatttcccacaaatcattagcggttttaaaggtgtggtcgatttttgtcgcggctatttttttcgcctgcgtgaaatttaaatccagctcatcaacgtggtgaagcgttgtcggattcgcgtgctcatcgacggcataaacctggtttgccggaagctggaacagatattcatcaacagatgttaagttgcaggttaaataaggatgaatacccacgccataaggcgctgcgacagtgccgatattctggcttgcgatctcaacggaaagacccgtgtgtgcgttgaggctataaacaacttgactagccagcataaacggatagccgtaactgggcggcagaaaagctgtcagggtaacgctggtggcggttaattcactaatttgccagtctcgccaggcaagcagcccgtgaatagcggctttactactatgttcattaatgggtaactgatattcctgcccctgatagcggtaacagccgttggcgatccggttcggccacggaataagcactttacccagatgcgccagcggcatctcttcgggtttgtgcgggatgactaaatgacaaccctgaaaggttaattcagccagaccagcaccgacggtcacaatggtcgcgtgataatcccccgcggcaagactaacggtctgtccactgcaatgcatattggtgatttgcatacaaggcaccttaattaagctcatacagcctcccgtgaggctgatgtcaaacccaaaaactgcaccggacggtcccctcgcccctttggggagagggttagggagaggggaaaacccgcaccctattttcagatcagttatttcgcattaatatccagcagacccgctgcaaccgctggagccatgccgggcgctaacgggatacgcgggatcaccaggcaatgcagcaggtgataaatatcctgtttgccgtcccagactttggtggtgaccttattgtccgcatccagctcctgccaccaggaaccattttcatagtccatcaggtacttaatgcagtactcccaccatgtttgataccaggtttcatactggcgatcgccagtgacggtgtagagcgcgtaggccgtacccattgcttcgacgataggccaacgtacacgttcgcggaccaccggttttccttcccagtcaacggtataaacaatcccgtccgcgccatcgggtgcccaggcatcgcgcacggtggcgttaaacagacctttggcatcttctagcagccatgctggtggttgttcgcaacgggcttccagggcagcatggatgtgcagcattaaacggccccattcgatccagtggcctggtgtacctccgaacgcgcggaagcgatgcgccgggttatctttgttgtaatccggcagcggattccactgggtatcgaagtgttcgttaacgcgataatgattatttctggcgacgtcgtggataatcacggaagccacgcgaatcgcgcgatccagccattttttgtcgtgagtgacgtcataaacaatcaagaaagcttccaccgcgtgcatattggcattgccgccgcggtactcttcggttttgctgaaggcttcgtcccaggattccaggcacatctgctcttcttcgctccagaaatatttctcgataatttcaatggtgtaatcgagcagcttgcgcgcttccgggtgacccgttgtgacggcgctggcggcacccagcagagcaaagaagtgttgatagccctgtttggaggcatccaccacgccctcgtcattcacgcaggcataccagccgccatattttttatcacgcagtgcgccgttcatggctttgataccgtgatcaaccaagctgtaagcgccaggtcgacccatcgccgcagcaacggaataaacgtgcaacatacgagcggtgatccacagatgggtgcccatctcttctttgatttgccctttattgcctaaccagccaaaaccagtcggcactacggaatttttaccaaaatcaaagatgcggtcggtttcctgttccagccaacggttgtggcttagggtgttaaaccatttcattccttttatcctcatcttagcggcgtttagccatcatttcgtcgacgatatcgccaagttgttgtaatttcggtgcgcaaacgtcacgcagcatcagctcgttgtctggtaaaccgacgacgcttgcccagactgcacggcctgccaggaatccgcttgcgcccgccgtcattgccacgcgtacggcacgcgggaacagtttttcgtcgacaccggaagagaggatcacccatggcatattgatatggtcattcagacgttgactagcacagagaagctcttgttgcggacctttgccataaagcggcatttcaactttgtagaggtcagcgccactgtcgcccagctctttggcggcatcgatgatcgcttgttcgcgatcgaatttatcgccacgacgcggtgggcggacgactggctcaatgatgcttaccagaccgtgactgtggcacagttcgttgaactctttcaccatatccagacgttgctgcgcatcttcatcactacgccacagcaccagcagttttaaggctttgccaccgtcttgtttgatctgtagcggattgattttgcggtcaataaccacgctatcgaccggaataccgttgccaggaatgaactcatcggcggcgacaatcatggcgcaacttttggcaatcgcgttttgctcaaccacctggcggtagcagaattgttgatctaccagaatcgcgctggcataagggctgagggcctttgcagcgttaactttgaaatcagttaaaacgctatcggctaccggagcgggtgccccagccgcggcaaacatcatgcgcatggcttcgcgctgatcgaccgccagcatggcaaaaccgccgcttgcgcgcgtaatgtcgttgatggtgtacttattcattcatttattcctttatccagtcgttacatttttactttggcagtcatcccggcactgacacggacctgttccagaatggcggaccagtcctggcgaccgcgacccgctgcgcgcgcctggctataaacctcccgactggcggcccccagcggcattggcacatgcagctggttggcgacatcaagggcgatgccaagatccttatgggcaagatcgatcatgaaggcgggagaaagatctccgctgaggactttgtttggccaggaagtggtgaagtgacctttaccggcggcggtaccgctcatcactttgacggcaacatcgaagggaagattcagggcttcgcacaaaacggcggcttctgcgctaagcgcattgagcgcgatgctcatgtagttgttgatgagcttaacgcggatccccatgcccggaccgccagcgttgatcaactcactgcccatcgccatcaggatcggtgtggcacgttcaacttgttcagcggtgccgccagccagcagtaacagagtaccggtaatggcatttgcagaagtacggcctaccggaacatccatcatgctgaagcctttggcttgcatatcggcaatcaatttatcggtttgcagcggatggatggtggacatatcaatgaccagcgcatcggtagataagccttcgcaaacgccgttttcaccgaacaacacgttgcgcaccagatcgccattcggcaacatggtaatgataaattcggcatctttagcggcctgcgccgggttggcggcgggagtcgcacctttgtctaccagatgccgcacagcttcggcgttcacatcaaagacgcgaagttgatgcccttgctgcaataaattgctcgccattgggctacccatttgtcctaaaccgataaacgcgattgctgccataaccctctcctgaatacagttatgtcactttttgtcatttatgacatgctttgcttgtctgtttttgatcgtatttgtaatttatcgtcaaaaaattgacagccgtcactttttaaacaattggtgaaattaaaatgaacgcatcccaaaatgtttaaggaatgaccatgattcgtgttgcttgtgtaggtataaccgtgatggatcgcatctattacgtggaagggttaccgacggagagcggtaaatacgtggcgagaaattatacggaagttggtggcgggccagcggcgacggcagcggttgcggcggcaaggctgggggcgcaggtcgattttattggtcgcgtaggtgatgacgacacgggcaacagcctgctggcagagctggaatcctggggcgttaacacccgttacaccaaacggtataaccaggcgaaatctagccaatccgccatcatggtggataccaaaggcgagcggataatcattaactaccccagcccggatctgctgcctgacgcagagtggttggaggaaattgatttctctcagtgggatgttgtgctggcagatgtacgctggcacgacggcgctaaaaaagccttcaccctggcccgtcaggcgggtgtgatgaccgttctggacggggacattacgccgcaggatatcagtgagctggtggcattaagcgatcacgcggcctttagtgaaccgggtctggcgcgcttaacgggcgtgaaagagatggccagtgcgctaaaacaggcacaaacgctcacaaatggtcatgtctatgtgacccagggtagcgcaggctgcgactggctggaaaatggtgggcgtcagcatcaaccggccttcaaagttgatgtggtagataccacaggtgcgggtgatgtttttcacggcgctttggcggtggcgctggcaacaagtggggatttagcggagagtgtccgcttcgccagcggtgtagcggcgttaaaatgcacacgtcccggtggacgagccgggatccctgactgtgatcaaacccgatcttttttgagtctttttgtataaaatgccagggtgatggtttttcgaggaattttcatgagccttaccgaactaaccggtaacccgcggcacgaccaactcctcatgctgatcgccgagcgtgggtatatgaatattgatgagctggcaaatctgctggatgtctccacgcagacggtccgccgggatattcgtaaattaagcgagcaaggcctgattacgcgccatcacggtggcgcgggtcgggcttccagcgtcgttaatacggcgttcgagcagcgtgaggttagccaaaccgaggaaaaaaagcgattgccgaagcggtggcagactatattcctgatggtagtacaatatttatcaccattggtacgactgttgagcatgttgcccgggcgttacttaaccataatcatttgcggataatcaccaacagcctgcgtgtggcgcatattctttaccacaacccgcgctttgaagtgatggtgcccggcggtacgttgcgctctcataatagcgggatcattggccctagtgcggcgtcctttgtggctgattttcgtgctgattatctggtaacaagcgttggggcgattgagagcgatggcgcgttgatggagtttgatgtaaacgaagctaacgtggtgaaaacgatgatggcgcacgcgagaaatattctgctggtcgccgatcacactaagtatcatgctagcgcggcggttgaaattggtaacgtggcacaggtcactgcgctctttaccgacgagctgccgcccgctgcgctaaaaagtcgcttacaagacagccaaattgaaatcattcttccccaggaagacgcgtaaatttttgtgaccgttaacctggcttcataccttgccacatagccaaacccatcctttcccgctacagttaatttcttgtggcgcgaaaggaggcaaaaatgctctatatctttgatttaggtaatgtgattgtcgatatcgactttaaccgtgtgctgggagcctggagcgatttaacgcgtattccgctggcaagccttaagaagagttttcatatgggggaggcgtttcatcagcatgagcgtggggaaattagcgacgaagcgttcgcagaggcgctgtgtcatgagatggctctaccgctaagctacgagcagttctctcacggctggcaggcggtgtttgttgcgctgcgcccggaagtgatcgccatcatgcataaactgcgtgagcaggggcatcgcgtggtggtgctttccaataccaaccgcctgcataccaccttctggccggaagaatacccggaaattcgtgatgctgctgaccatatctatctgagccaagatctggggatgcgcaaacctgaagcacgaatttaccagcatgttttgcaggcggaaggttttagtcccagcgatacggtctttttcgacgataacgccgataatatagaaggagccaatcagctgggcattaccagtattctggtgaaagataaaaccaccatcccggactatttcgcgaaggtgttatgctaaaaaccattcaggacaaagccaggcaccgtacccgtccactatgggcctggctaaaactactctggcaacgcattgatgaggacaacatgacaaccctggcaggtaaccttgcctatgtgagcttgctcagtttagtgccgctggttgccgttgtttttgcgcttttcgccgcttttcccatgttttccgacgtcagcattcagttacgtcactttatttttgccaactttctgcctgctactggcgatgttattcagcggtatatcgaacaatttgttgccaattccaacaagatgaccgccgttggggcgtgcgggctgatcgtcaccgcgttattgttgatgtactccatcgatagcgcgttgaataccatctggcgcagtaaacgagcgcgaccaaaaatttacagcttcgccgtgtactggatgattttaacgctggggccgctgctggcaggggccagtctggcgatcagttcctatttgctctccctgcgctgggcgagcgatctcaatactgtcatcgacaacgtgctgcgtatttttccgttgctgttgagctggatctccttctggttgctgtacagcattgttcctgccatccgcgtacctaaccgcgacgcgattgtcggcgcgtttgtcgccgcactcctgttcgaagcaggaaagaaaggtttcgcgctttatatcaccatgttcccgagttatcagctcatttatggtgtgctggcggtgatccccattctctttgtttgggtctactggacatggtgtatcgtcttgcttggcgcggaaattactgtcactctcggggaataccgcaaactaaaacaagcagctgaacaagaagaagacgacgaaccatgattgcattaattcaacgcgtaacccgtgccagcgtcaccgtggagggagaagtgacgggcgaaattggcgcgggacttttggtgttattgggtgtcgaaaaggatgacgacgaacagaaagcaaaccgtctgtgcgagcgtgtgctcggctaccgcatctttagcgatgccgaaggcaagatgaatctcaacgtgcaacaggcgggcggcagtgtgctggtggtttcccagtttaccctcgccgcagataccgaacgggggatgcgcccaagtttctccaaaggtgcaagtccggatcgcgcagaggcgttatatgactatttcgtcgaacgctgccgtcagcaagagatgaacacgcaaacaggacgcttcgctgcggatatgcaggtaagcctggtcaatgatggccccgtgacattctggttgcaggtatgagccagcttccagggttgagtcgggaaacaagagagagtatcgctatgtatcaccttcgggttccacaaacagaagaagaattagagcgttactatcagtttcgctgggaaatgttgcgtaagcccctgcatcaaccaaaaggtagcgaacgcgacgcgtgggatgcgatggcgcatcaccagatggtcgtcgacgagcagggtaatctggtggcggtaggccgactgtatattaatgccgacaatgaagcgtccattcgctttatggccgttcatcccgacgtgcaggacaaagggttaggcacgctgatggcgatgaccctggagagcgtggcgcgtcaggaaggcgttaagcgcgtgacctgtagcgcccgtgaagacgcggtggagtttttcgccaagctggggtttgttaatcagggagaaatcaccacgccaaccaccacgccgattcgccattttttgatgattaagcccgtcgccactctggatgacattctgcatcgcggcgactggtgcgcgcagctgcaacaggcgtggtacgaacatatcccgcttagtgaaaaaatgggcgtgcgcattcagcaatataccgggcaaaaatttatcactaccatgccagaaaccggcaatcagaatccgcaccatacgctgtttgccgggagtttattcagtctggcgacgctcactggttggggacttatctggctgatgctgcgtgaacgccacctcggcggaacgattattcttgcggatgcgcatatccgctacagcaagccgattagcggtaaacctcatgcggtagccgacctcggtgccttaagcggcgatctcgaccgtctggcgcgcggacgaaaagcacgggtgcagatgcaggtcgaaatctttggcgacgagacgccgggtgcagtgtttgaaggcacgtatatcgttctgcccgcgaagccatttggcccgtatgaagagggcgggaacgaagaagagtaactgatggagaggggcggtgctgcctctctcattcaggtcatttatattagtccttggctatttcggttatattaaataagaactctataaatttttattcttcgttggctccatacgtgtcttgctacatcactgttcaggagcatttaaatattatttgtagaactgagtggcaattatcgcagataatgcttaattcatcatcttagttcatgtttgagcgatttttgatagtcaaaaccccctctggtgccatacttttctcataaatatttttaaaatctatagctaacaaatattatgcaaagataatggactagcatcattgtcagtatcattcatttactgctctgtatgttatgaataattatgttgtatgtttgctcttaaaccgtgggaaggaggctataatggttgccaatattaatctcattaaacaagaaagttattctgttgttaatttagaaaaacaactttcccgaactgttaccaacaaaattataacgatgagcaagtaaagaccggttggtggcagtactgaccggtctgtgatgaaagattaatttcaccttaaatcctggtgctgttaggatgctgacgtttttcggctacaccattcagattatgcaaataaatatctctgaatataatatattcatagcacccataattcatcctgggcgataactaaaccatttttgagtaataaatgaaacaactgcaacactcttattatttctggaaaacgcctcgcaaaaacaaaacaacatgcaaaaatccgctttttttaaatgattttccggcgtaattttcgcacatacattaatgagtaatatatgtaaggtattggtaatggcgatgaatacggtttttcttcatttaagtgaagaggcaattaaacggctgaacaagcttcggggctggcgtaaggttagtcgatctgcaattttacgcgaagcggtagagcaatatctggaacgtcagcaattcccggtgcgtaaagcaaagggaggcaggcaaaagggggaggtagttggtgttgatgatcagtgtaaggagcataaggaatgacaaaaatttttcattcttgaatataaaaaacagatgcccttattctggtattaatacaaggctgttttacttgaacttataataactgcaactgttacatcatatctggaaaacgcctcgcaaaaataaaaaatgatgcgtaaatgagctttctttaaagattcggcaagggtacttttctctccatagattcaaaaatgatattggcgagatatttatgaactctctggcaggtatagatatgggcagaattttactcgatttaagcaatgaggtgattaagcaacttgatgatctcgaggtgcagcgtaatcttcctcgtgcggacctattaagggaagcggtagatcaatacctgataaatcaaagccaaacagcaagaaccagtgttcctggcatctggcaagggtgtgaggaagatggtgtcgaatatcagcgtaagctgcgcgaggaatggtaatgggaaaaaatgatgtcaatcagattgctgacaacgtgcgcgttgttcatgccggatgcggcgtgaacgccttatccggcctacaaagtcgtataaattcaatgtattgcagtttattggtaggcctgataagcgcagcgcatcaggcaatcttacgcttgtcatcagtctcatgcccataaccttattgatgtggtggtgggtaaattgaggccaaaccggcactggcggcatagcttgaggtggtaacgcggaatacgagagatggtgtcgtcacaccctatgagctgtaatccgggcgacctgcgccacccggaaaacgtcagagattactctccttcacccggaaacaggaacgggttgatggaactgcgggcatagccttcttgctccattcgtgcgtccagtaccagagaggcgaggtcatctgctacggcttcgatttttggatctttttcctgatagagaattttcaggtaagtgtcgcagtcatcgcagctttcggctttaatcgcggcctgttcgtcatccaggctccagtaatgcagtttgccgctctgctcgcagttgctgcattttacgcgcactacgtgccattcagtttcacacaggttgcagtgcaggtaacgtagcccctgagtggtgccaatttgcaccatgctggacaccggcatagaaccacaaaccgggcaatattgacgttgctcgccgtattcagcgcgggctttgccggggatcagattggccatctgcgcccagtagaggctcagtgcagcccagataaacggcgctttatcgctgctgacggagctgaaatcagaggcaaacagcgcgctggccatatcttccagctcctgagtgcttgccttctccagattctcaatcactgccagcgccgggccgctcatttcaggtttcagctcagcaatcagcgccatcagcagcttttgccagtgcttatcacgcggcagaacgtgaatatccagcgggggcttgccttgtgcgctggcttctttaatgcgcgcagtcagatccatctccagcggatggtcgtacagcaccacttcctgggcgtgggcgataagcgcagcaaagcgcaggtaatcacccagaggattattttctgccagctcgcgcagacgctcggcgcggcggttgtataaattcttgagccgagggaacaataacggcggaatcatatccgccgtacgtttctcgctactacccagctcatcttgcgggattatgcgaatactcattcagctttcttttccgttgtcttgcggacctcacggtaccagcgcgggtgatgtttcttcgcccaggcgctggtaacccatccttccaccatggcggtaatcgtgcctttcacccaaagggcggcgtagatatgcaccatgataaccacaattaacgccactgcggcaaaactatgcagcattaacgcgaatcggatcaccgggatactgaaagcaggcgcaaaataaggacgccagataatcacgccgctcaccagcagcagaaccaggaaaataatcgccgcccagaaaacgcatttctgaccgaagttataacgcccggtgtcacctacttcctcgttgacgacgatcttacgaatattcttcgcccaaaagatatcatcccgattgattaggttgtgatgccagtaacggaaaaacatgatgatgaagctggcaaacataaccacgccgacaaacgggtgcagaattcgcgccagctgcggtgtgcccatgatttgcatcaaccagttgaaggacgggaacaaaaagcccagcccgctcaccgccgccaggatgaagcagaaggcggtgatccagtggttgatacgttccggcgcggtgtagcgcacgatggtgtcacgtcgtttcatttgcgctcctcgtctttctcttcgtgcagattattctcttcctcatccgcacggttcggaccgacacccacgtagtggaagatactggccgcaaaggtagccgcaaagccaacagccgcgagcggtttccagatgcctttccagaatttcacggtttcgctgatttccgggttctccggcaagccatgatacagatttggcttgtcagcatggtgcagcacgtacatgacgtgtgtaccaccgacgcctgccggatcgtacagacccgcattgtcgtaaccgcgggttttcagctcagcaacgcgctcgctcgccagcgttttcatgctctctttcgtaccgaagtgaatcgcgcccgttgggcaggtcttcacgcaggctggttcttgcccaaccaccacgcggtcaacgcacagcgtacatttgtagacgcggttgtcttccgggttgaggcgcggaatgtcgaacggacagcccgcaatgcaataaccgcagccaatgcactgctcggactggaagtcgacgataccgttggcatactgaataattgcaccttccgccgggcacgctttcaggcagcctggatcggaacagtgcatacagccgtctttgcggatcagccattccagtttgtcgttctgctccacttcgctgaagcgcattaccgtccagcttttggcgcttaaatcattggggttgtcgtacaccccaatgttattgccgacggtatcgcgaatgtcgttccactcactacacgccacctgacaggctttacagccgatacaggtggtaacgtcgatgagtttcgccacttcttcctggaagtcccgcgcctgaggcgcgggggtcagaccgttagtcgcggaacgacgaatgatatcttgagattgataagccatatgtcgtctccgttacaccttttccacattcacaaggaaggacttaaactccggcgtctgcgtgttcgcatcaccaacgaatggcgttaaagtattggcaataaagccttttttagctacgccttcatagccccagtgaatcggaataccgatggtatcgatatctttgccgttcgctttcagcgtgcgaatacgtttggtcaccaccgctttggctttgatatagccacggttggaggagactttcacggtatcgccctgggcaatgccaagtttattcgccaggctctccccgatttccacaaactgctctggctgcaaaatcgcgttcaacagcgcgtgtttggtccagtagtggaagtgctcggtcagacgataggtggttccgacatacgggaacttatcggctttacccaatgcttcggcgtcgtctttaaagatacgtgcagccgggttgctgataacgtttggatgcagcgggttagttcccagcggcgtttcaaacggctcgtagtgttccgggaacggaccttccgccatcttatcgagggcaaacagacgccccatgccttcctgctgcatgataaacggcccgacgccgctacccggaggcgctgcgctgtagtccggaatatcccagccggtccacttagtgccgtcccatttcagcaactgacgcttcggatcccacgggttaccctgcggatctgcggaggcgcggttatacagaatgcggcggttaagcggccatgcccatgcccagcccagcgtgttaccgaggccagacggatcggcgttatcacggcgtgccatctggttgccttccggcgtccagctaccggcgaaaatccagcagccacaggaggttgtaccgtcatcgcgcaattgggcgaagctactaagttgttggcctttcttgacgataaccgcaccggttgccggatcggtaatatcggccagcgccttaccgttgctctccatcgccacttcttcactagatggctcatgcggaatggcgtagttccatgtcatgttcagcacctggtccgggttcgcgccaccctgttcggcatacatcttgcgcaagcgcaggaagataccggagaggatctcgccgtcagtcagcgcaatccccggggcgtccgcacctttccagtgccactgtaaccagcgaccactgttaacgatagaaccgttctcttccgcgaagcaggtgcttggcagacggaacacttcggtctggatcttgctgctgtcaacttcgttcagctcaccgtggttctgccagaagttagaggtttcagtgttcagtgggtcgatggtgacgaggaacttcagtttgctcagacaaccgatcactttgtttttgttcgggaaactggcaacagggttaaagccctggcagatatagccattgaccttgccctctttcatcatctcgaagtattgcaggacgtcgtagcctttatcccacttcggcaaccagtcaaagccccagctattttccgccgtcgctttatcaccaaagaaggccttcatcatagagacgaagaatttcgggtagttgccccagtagtttacctggccttccagcagcggttttggcgtgttggcggtaaggtaggtttgcagatcggtctgcttctcgcttggcagcgtcatgtaacctggcaggctctggctcagcagccccaggtccgtcagcccctgaatattggagtgaccgcgcagggcgttaacgccgccgcctgccatccccatattgccgagcagcagctggatcatcgccatcgtacgaatgttttgcgcaccaacggagtgttgcgtccagccgagggcatacaggaagctggcagttttatcgtgagcactggtttctgcgatgtattcgcagactttcaggaacgcgtcttttggcgtaccacagatgttttcaaccacatctggcgtgtagcgggaaacgtgctgtttcagcaagttccacacgcagcgcggatgttgcagcgtggtatcgcgtttggcgaagccgttttcgtccagttcataagtccaggaggatttatcgtacttgcgtttttccgcgtcgtagccggtgaacaggccatcttcaaagccgtaatcctcacgcacgatcaggctggcgttggtataggcttcggtgtattcgcggttgaatttttcattgttcagcaggtacagcaatacgccactcaggaaagcaatgtcagtaccggaacgaataggggcatagtagtcagctaccgccgccgtacgcgtaaagcgaggatcgatcacaatcagcttcgcgccgttgtgaattttggcttccatcgcccagcggaacccgaccgggtgagcttcagcggcgttaccgcccatcaccacgacgaggttggcgttcttgatgtcgacccagtggttggtcatcgcaccgcgaccaaatgttggagcaagacttgctaccgttggtccgtgtcagacacgcgcctggttgtcgaccgcgagcatacccagcgcgcgggagaatttttgcgttaaatagccggtttcgttactgctcgcggaagcacacagcatcccggtggagagccagcggttaacagtcacgccttcggcgttttgcgcaatgtagttagcatcgcggtcttctttcatcagtttggcgatgcgatcaaacgcctcttcccaactgatttgctgccatttatcagaacctggcgcacggtattccggaaacttcagacggctttcggagtggatgaaatccaccaggccagcgcctttcggacaaagtgcaccgcggttgaccgggtgatccggatcgccttcgatatggaagatagatgctttggcgttttttgctccgtcaccgaggctgtacatcaacagcccacagcctacggaacaataggtgcaggtattacgggtttcgcgggtgcgcagcagtttatactgccgggtttccgcgagtgctacgctgggtgcaaaacccagtgccgctgccgtggtgcctgccataccgccagcgcagatcttaaagaactgccttctgctgacctgcatggattgctccttgtttcgacattgtcacgtcccatttacattcgcttgctgcgtgtgcagggagtgggagttatttttctttgcggaaggggccgcaaaggtccagaattggctcaatttccctccatccaggaagggtttgtaacagaataccataatgttggtgtgtgtgttcttatctggttaagagaaagtgaaaaaaacacagcgaaaagaaatcgaaaatgtgacaaatatcacaggtgttcgtcaaattgagttatggcggcgtgatgatttacaacacccacggttagatgaggtcgcggaagaagttcccgttgcgctggtctacaacggcattagccatgtggtgatgatggcgagccccaaagaccttgagtactttgcgctcggttttagcctttccgaggggattatcgaaagtccgcgcgatatcttcggcatggatgtcgttccttcctgtaatggtcttgaagtacaaattgagctttccagccgccgctttatggggttgaaggagcgccgccgggcgctggcgggacgtacgggctgtggcgtatgcggcgtggagcaacttaatgacatcggaaaaccggtgcagccgctaccgttcacccagacgtttgatctcaacaaactggatgatgcattacgtcatctcaacgattttcagccagtggggcaactgactggttgtactcacgccgctgcctggatgttgccatctggcgaactggtcggcgggcatgaagacgtgggtcgccatgtggcgctggacaaactgttaggccgccggagtcaagaaggggaaagctggcagcaaggtgcggtactggtttccagtcgtgccagttatgaaatggtgcaaaagagcgcgatgtgcggcgtagagattttgtttgcggtgtctgccgcgaccacgcttgctgtagaagtggctgagcgctgtaatctgacactggtaggtttttgtaaaccgggtcgggcaacggtttatacccatccgcagcgtttgagcaattaattaaaataagtcctgcgaaatatattaaattgcaggacttattcatttcgtgaattttattattttatttataaacaaaatgcgtgtagtggcgttttcttttttcatttattatgttcactctcttatctatatatttataaggcaattaaatgaaaaggaatttattatcttccgctattatagtcgccatcatgtccctcggtctgacgggttgtgatgataaaaaagccgaaacagaaacgctcccgcctgccaatagtcaacctgccgcaccagctcctgaagcgaaacctactgaagctcccgttgcaaaagcagaagctaaacctgaaacacctgcgcaaccggtggtcgatgaacaagcggttttcgacgaaaaaatggatgtctatatcaagtgctacaacaagttacagatcccggtacagcgcagtctggcgcgttatgctgactggctgaaagattttaaacaggggcctaccggtgaagagcgtactgtttatggcatctacggcattagtgaatccaacctcgctgagtgtgaaaaaggcgtaaaaagtgctgtggcgttaacgcctgcgctgcaaccaattgatggcgtggcggtgagttatatcgatgctgccgtggcgttgggtaataccattaacgaaatggataaatattacacccaggaaaattataaagacgatgcgtttgcgaaagggaaaacgctgcaccagacattcttaaaaaatctggaagcctttgaacctgtagccgaatcttatcatgcggcgattcaggaaattaatgataagcgtcagcttgcggaactgaaaaatattgaagaaagagaagggaaaacattccactactactctctggcagtcatgattagtgcgaaacaaattaataacctgataagccaagataagtttgatgcagaagcggcaatgaagaaagtgtctgaactggaaacgctagtggcgcaggccaaagaagcggataaaggcggcatgaatttcagctttattaatagcgcaggccagtatcaactcgaggctaaaaaatacgttcgccgcatcagagataaagtcccgtactctgactgggataaagagcaacttcaggacgcaaacagtagctggatggtcgaagactctttcccgagagcattacgcgagtacaacgaaatggttgatgactataatagcctgcgttaaacgtttttgatgataaatgcagtgtcggatgcggcgcatccgacacagttcaccccttgtgaagtaactccataaatgcctcatatcctgttaacccggcaataatctccgccggatgctgacacaatatgcttgccagatagctaaatatttttagctcatgacgcgcatcggcggcggcgcaggcgatcaagacatggttaatgacttcgttattcacctcaactggttgggcgagggtaataaaaaatccacgaaaacgtcgctcctgttcgctccagcaatgtgggatggcgaggcgattaacaatcaggttttcaccttcgccttcgcgggcgatgatgcgttgtgcttcatcggcggtaatatggtgttgtgcgactaattgcgcacaaatttgccgggtaatatgttgccagctttcaccgcgtacattgctataatgaaaacttccgggggcagagaaaaaacgctccggctgttggcgaataaatgccgtcgccagaaaatgttttatttgttcgataccggcagccgtaatgatattttttacggtgatgtaattatttaccgcgtcatccagtaaataatggctgttgttaatgatcaataacggctcaatctcttcgcgaatggcaacaagttcgcttaagctacgggcaataattacccgacaatttaaaacatcgcgctcaatggcgagctgattaatagtggcaatcgcgttctggtcgctgagcaaaatgatcggctggcgttcgttttgatgccgctccagcgcacaggcaaaatacaaaccgatcagatcgctgtcgaaaaggggaatatcgagctgttcacgcagtagcgtaataaagtgcagactcatatcaaaggccgcaggccaggcggctttcaggttattcatgctgctctggcggtgctcagcaatccacactggtgcggcaaggcaacgtaataaatgcccggtaatattctcaaccagctgcgcatcaataatattcaaactcgcgatgcccggcaccctttgcagcaacccctgcacattatcggcactaattacctgcgcttgctgatgctgtttctctatcaaacccgtcagggttcttacagcgttatcaccaagaaacagaccgctatgttcaacgatttgttttatctcgtcaccgggatattgcggccactcatcggtcagttgattacgcagggcgtaaatcgccagaatcaggctggagagataatcaccctgcatgagcggccagcggtgttggttgtcgcaggccgtggataaatgctgaaggttgtctcgtgttatgcccgccagcggaattaaaaacggatctttgcgcagcaagttcgccagcaagataacgcgtttctcttctgtctcatcaatgaaatggcccaaaccagggcggctggccaggcaacaagtgcgttcataacgctgttttaaccggggcagacgctctgctacccacgtttctggcaaattaagcgcgctggcgagttgcgcacggggagtgaaagtattcagtaataacagcgccagcagccgatcgtcgttatcgtgcttttgcagcaactgaaaaaagctgcggcgctcgaagatttccagctgatagcccgcactgccactggcgaaaatgcgggctttgccgttaagggtgaagttgagatagtcaatatcacgcaggatggtcctgccactaacgccagtctgttgcgccagctcgccaggcgtgcgcggctgttgctccagcagatcgacaatctttaactggcgttcgtttagcattaatccacctgacggaactggctaaacgcgttgactttctccgcagttaaggtcgtcagaaaaccccgtatcagcgtgagcagagcttcgtaatcggctttactaatcataccgctgttggcgtgcagataacgagttggcagacacagcgcgacaaccggacgcccgccgcccatcacgttgtagcgcccgccatccgtcgcaccggttttcatggtggaaaattgcagcggtaaatcgttatgtgcggcacagctttttaacgctgctaccagtttctggttggggaagtagcgcttgtcaaacagcatcagccccggcccctggcccagtttcagcgggtatttaatgttatcaatgcccggaacatcgcccgctacggcggtatccaacacgatcacgacgtccggtttaatgtgttccgcgctggtttgcgccccgcgtagcccaacttcttcttccacactgccaacgccatacagcgtaatttcgggattattcaccgtctgcaatagttcagccatcattgcgcagccgatgcggttatccaacgccttgccgaccactttatcttcgccccagcaggcaaaattggcttccgggctaataaaattaccaatttccacgccgcgcttttccacctcttcgcgactgttcgcgccaatatcaatgaacacctcatcaaaactcagcggttgttgcttttgcttttccgttaacgcatgaggcgcgacggaaccaatcacaccagggattttcactcccttgtgtgtgcgtatggttacccggtggttgagcatgctctgattccaccagccgccaatggtggtaaaacgcagaaaaccgctctcgtcgatgtgggtgaccataaagccgacttcatccatatgtccgacaacggcaacttttggacctttattccccttacgggcaacaaagctgcccagaccatcgaaggtgatttcattcacgcaaggttccagcgtgtttatcagaatgtcgcgaacttcctgttcatcgccgctgacggcgctggcttcgcacaactgttgcagtaactcaatgttcatggacaagctcctgttgcgcggctttcgctttgcggcgtaaccacaatcctttcaggacgataatgaaactaatgttcagcgcgaggccaatcgccagcaccagataaaagctacccaccgggctcatcaggccgatcagcgggtcaaagatacccaaaccaggtgccagacgtttgattccgaaagcgatcaccagcacgccggtaatgccgcccgccagcgtattggcggtaatcatcggcaacggagctgccagagcgtaaggaatagccggttcggttgcgactgtggcaccgaccacaatggcactactggcagcctctttttcctgtcgggtaaacagtttgggcgcaatgaacgtcgcaagacccgccgcgacgggcggcatcagcgcgacaacgccgacgatggcgtaccagtcataaatgtgtttttccagcagactgaagcagaagaaccaggcggttttattgatggggccgcccatatcgaacgccagcatcgcaccgaccagaaacgctgccgcaaacttcatacttggaggaatggtattcaggaagtggagcagcccgcccatgaggtcggacatcaccggcccgataacgtagtaagtgagcacgccgaaaaccagcagagtaacgaacgggatcagcatactaccgagcagcggttgtaatgctttgccaaggcgcactttgcggaaccagaagacgaaatagccaatcgccagccccagcaccaccgcgccgaggaatcccgcaccgctctgggtgccgagcagcgctttgtcgttcgccagatagcaaaccagaaacgccggagcgaaagccggtttatcggcaatgctgctggcaatataagcgcccatgatggggatcataaaggtgaagccaaggtaaccgatggattcaactacccaggtaaagctcggcgcgcctttgctcatatcggtatacggcaaaccgaactgcaccagcatgttggcaagcgccaccaggataccaccgccgatgacaaacggcagcgccgcagagacgcccgccatcaggtggctcatcacgctaccgctttgcacttcctgtttgccaagcttcacgccgctatctgcggcaaaaagctggctgtttgtcggtaattcgctgaaaatctggtcgatatttttcaacgcctgggagatggcaatctcataaactttcttcccggcaaaccgcgcgcgatcatcaccgctcaggccacgcccggtagcgagaatgacgtaatcggcagcggcaatctcttcgctggataagcggttttcaacgccactggacccttgagtttccacttttatggtatgaccgagagaacgggctttctgttccagggcttccgccaccatgtaggtgtgagcgatcccggcggggcagttggtgatcgcgacaatacgtaaggaactctccatcgccacttccttaactgctgagggtttgatttaacaaggcaagcgcctggtcggtatcgccctgttgcagttgatgaataaattccttgtgaataattttgcgacacagtgtgccgatgattttgacctgatcctcttcgccgctttgcggcacgccgaggcagatccagcaattgacgtcttcgccatcgctggctttccagtcaatagcctgcgctttgcgggcgaataatacgaacggttgtttaacgcaggcgcttttaccgtgcggcacggcgacaccggaaccaaatccagtagagtgcattttttcgcgcagcagcagggtttgcaggaactggtgactgtcggtgataaaaccgttttgtaacgctattgtcgccaactgcttcagaacggaataagcgccattgccctgaatattcaggtcaatacagcttgcagtaagagctgccattaatcggactccataaaatatattttaatcaattgtaatggtggagcgattaagtgatgagaggcgatatgtcggtaaacaatgacaatttgagacagagtgaaaggtcagatttgcggagtaatgcacataatggttatttaaataaaccacatgaatcattaatgggttattcattatttttgtgatttactcacaatgtatcagggaaatataacttaccgggagatgtaatatgtttaatttttcaaatcgaaatttaaaatattgtgccggaggcatctctggcacattgggcaattacggcaggtaaaacacttcttgcagctcgctactcaccgggctgttatccgggttagcgggcataacatcggtcatatatttccaccaacgttggcagacatcagtgctggcaaccgcattccagcgttcttcagattcaatctctaccatggcaaacagcagattacgcgctttgtcgagatagatggcgtagttatgcgcaccgtgagatttcagcactgcttccagttctggccagatgggattatgccgacgctgatactcttcgtgggcgtcggggtttacctgcatgacaaaggctttgcggatcatgtttgctccttacagcgccagcgcactggcgagtggcgtaacgccgaaacgcttgccgagcgctatcaactcttcacggctgatggtctgtttcatgccgcccatgctataaaccttcactaatacttgtgcacttttttctgcggtgtcgattaaaccgaaggtttcatccagcgtcggtccgctgccgaagacgccgtggaagggccacaacaccaggctatgtttttgcatctcttgtgcggtcgcctggccgatttcgtccgtgccgggcaccatccacggcaaaatgccaacgccatccgggaataccaccagacactcggtgctgccttcccccagttggcgagtgaagaccgcggtgtcgttttcaagtacataggtgagggcgatcaggttggtggcgtggcagtgcatgatcacccgatctttgccgttggtggctttaatgcgctcgcagtgggaaaggaagtgagccggaagttcggaagtggggacggcttcgttggttaacccccaaagaatgtggtagcccgcgccgtcgctgtcgacttttacgatgcctaagttagccgcaggatcaagctggacgttacggaagaatttgccgctgccggtgacaataaacggtgtatttgccagtaaaggcatgggctggctgagcgggatatagcgcggttgttggtggaaattgtcgtgatatggtgcgatatcggcgtcatccaggcgtagcgtcaggttgccgccgttgcgctcatcccagcctttcagccaggcgtcggtggtggctttgatcattccctggacaaaccaggactgagtaatgttttgcatgttctgtgttcctgtaaattcggtgttgtcggatgcacgacccgtaggccggataaggcgctcgcgccgcatccggcaatcaatgcctgatgcgacgctgtcgcgtcttatcaggcctacaactattgccgacctgtaggcctgataaggcacttgtgccgcatccggcaatcaatgcctgatgcgacgctgtcgcgtcttatcaggcctacaactgttgccgacctgtaggccggataaggcacttgtgccgcatccggcaatcaatgcctgatgcgacgctgtcgcgtcttatcaggcctacaactattgccgacctgtaggccggataaggcacttgtgccgcatccggcaatcaatgcctgatgcgacgctgtcgcgtcttatcaggcctacaactgttgccgacccgtaggccggataaggcgctcgcgccgcatccggcagtgtttacccgcggcgactcaaaatttctttctcataagcccgcacgctctccagccattcgctacctgctggcgtatcgtgacgttggcaatacatttcccagaccgcctgccacggcaagcttttctgctcttccagcagtgccagacgcgcagtgtaatcgcccgccgcttccagcttgcgcagctcagcggtaggttccagcaacgcacgcagcagggcttttttcatattgcgtgtaccaatgacccacgcggcaatgcggttgatagaggcatcgaagaagtcaaggccgatatgcacccggtcaaacagatcgtgacgcacaatctcactggcaattgcctgggtttcatcatccagcagcactacgtgatcgctgtcccagcgaaccggacggctgacgtgcagcagcaactgcggcacatacagcatggcggcggaaatcttgtcggaaatcacttcagtcgggtggaagtgcccggcgtccaggcacagcgcagtctggcggctggtggcataccccatgtaaaactcattggagccaaccgtgtagctctctgcgccaatgccaaacaatttgctctcaacggcgtcgatatggtgcgcagggtttagcttctcgctgatcacctcatccagtgctgccagcagacgctgacgcggggcgagacggtcaacggtgatatctttcataccatccgggatccagatgttcatcacgcttggtgtgccgagttgctcgccaaaataggcgctaacgcgacggctggctttgcagtgatcaatccagaactggcgaatgctgtcgtcggcatgggaaagcgtaaagccatcggcgcttagcggatggctaaagcaggaggggttaaaatccagaccgagctgattggctttcgcccattcaacccagtttttgaagtgctctggtttgatctggtcgcggctgactggcgtatcactttccagatagatggcatgtaaattaagccgtttcggccccggaatcagccgcatagcctgttccagatcggcacgtagctcactggcattacgcgctttgcccggataattgcctgtggcctgaatccccccggtcaggctaccttccgggttttcaaaaccggaaacatcatcgccctgccagcagtgcatactaacgggtaaacgatcaagttggcgcagcgcctcctcgacatcaatccccaccgccgcgaaacgctgtttcgctagctcccaggcctgttccagttgagtggtcatgcgcaaagctcctttgtctgtcgtgtagagtgaatctgcgccacatagtgggcaatttcactgtcaggattaggggtaaaggtggtcagattcgcggtggtgctgacgacctgacggaaatcatccacattgttgagttcatccagcgtcattaactggatgccgatattgccgagcgtgctggcttcaacaggcccggcgatcacccgaataccgcaggcatcggcgcatagctggttgagcagcgtgttctggcagcctccgccgacaatatgcagttggctgaaatcttcaccgcgcagctgcgccagctcatgcaacacatcggcatacagcagcgccagactgtcgaaaatgcagcgcgccagttcagcatcactttccgggatcggttgcgccgtttcccgacacgcagcctgaatttcgctgcacatcgtctcaggattaataaagcgatcgtcattgggattgataatgaagcggcaagccggaagtgcctgtgtcgcggagataagcgccggaagatcgttgatttgctgctcctgaagcactcgctgaagcagccataagcccataatatttttcagcacccgatagcgaccttccgccccgccttcattggtgatgttggctgccagtgccgtgtcattggtaaatggcgtctggctttcgaagcccatcaaactccaggtgccagaagagagataagcagcacgactgccgtttaacgggctggcgataaccgcgctggcggtatcatggctggcaacggcgaccactggaatctcattaccctgcgggcaaatccagtgacctatgacattacccggatgcgtcgggcgaccaaaccaggctttgttggccccgctccacgccagtaggctctcgtcccagtcgtcgctattgatattgaccagttgcgtggtcgtggcgttggtatattcccagttcatcttgccggtcaggcgataactgaagtaatccggcatcagcagagcgtgagcaatgtgtggaataagttcaggttgttgctccgtcagcgcacgcaactgataaagcgtattgaagggcagaaactggatgccgctacgttgataaatatcgcgtttgccgagttgttgttgtgcctgcgccattaggccattggtgcggctatcgcgataagcaacgggcaggcccacacgctgaccctgttggtcgagcagcacaaagtccacgccccaggtatcaatcccaatgctatcgatacgaatcccttcctcgcacaccttgtttaatccaaggcgaatggcactttcaaggctatccacatcccaggtgacatagccgttctgactatgcagcccattgttaaaacgatggatttcgcgcagcgtcaggctgcggcattcacgctcgtaacgcgccagcatcacgcgcccactggatgcgccgagatcgacggcgacacaattgcgaaaggtcataatgtgatcctgctgaatttcattacgaccagtctaaaaagcgcctgaattcgcgaccttctcgttactgacaggaaaatgggccattggcaaccagggaaagatgaacgtgatgatgttcacaatttgctgaattgtggtgatgtgatgctcaccgcatttcctgaaaattcacgctgtatcttgaaaaatcgacgttttttacgtggttttccgtcgaaaatttaaggtaagaacctgacctcgtgattactatttcgccgtgttgacgacatcaggaggccagtatgaccgtattacatagtgtggatttttttccgtctggtaacgcgtccgtggcgatagaaccccggctcccgcaggcggattttcctgaacatcatcatgattttcatgaaattgtgattgtcgaacatggcacgggtattcatgtgtttaatgggcagccctataccatcaccggtggcacggtctgtttcgtacgcgatcatgatcggcatctgtatgaacataccgataatctgtgtctgaccaatgtgctgtatcgcagcccggatcgatttcagtttctcgccgggctgaatcagttgctgccacaagagctggatgggcagtatccgtctcactggcgcgttaaccacagcgtattgcagcaggtgcgacagctggttgcacagatggaacagcaggaaggggaaaatgatttacccagcaccgccagtcgcgagatcttgtttatgcaattactgctcttgctgcgtaaaagcagtttgcaggagaacctggaaaacagcgcaagtcgtctcaacttgcttctggcctggctggaggaccattttgccgatgaggtgaattgggatgccgtggcggatcaattttctcttagtctgcgtacgctacatcggcagcttaagcagcaaacgggactgacgcctcagcgatacctgaaccgcctgcgactgatgaaagcccgacatctgctacgccacagcgaggccagcgttactgacatcgcctatcgctgtggattcagcgacagtaaccactttagcacgctttttcgccgagagtttaactggagtccgcgtgatattcgccagggacgggatggctttctgcaataacgcgaatcttctcaacgtatttgtacgccatattgcgaataatcaacttcgttctctggccgaggtagccacggtggcgcatcagttaaaacttctcaaagatgatttttttgccagcgaccagcaggcagtcgctgtggctgaccgttatccgcaagatgtctttgctgaacatacacatgatttttgtgagctggtgattgtctggcgcggtaatggcctgcatgtactcaacgatcgcccttatcgcattacccgtggcgatctcttttacattcatgctgacgataaacactcctacgcttccgttaacgatctggttttgcagaatattatttattgcccggagcgtctgaagctgaatcttgactggcagggggcgattccgggatttaacgccagcgcagggcaaccacactggcgcttaggtagcatggggatggcgcaggcgcggcaggttatcggtcagcttgagcatgaaagtagtcagcatgtgccgtttgctaacgaaatggctgagttgctgttcgggcagttggtgatgttgctgaatcgccatcgttacaccagtgatagcttgccgccaacatccagcgaaacgttgctggataagctgattacccggctggcggctagcctgaaaagtccctttgcgctggataaattttgtgatgaggcaagctgcagtgagcgcgttttgcgtcagcaatttcgccagcagactggaatgaccatcaatcaatatctgcgacaggtcagagtgtgtcatgcgcaatatcttctccagcatagccgcctgttaatcagtgatattagcaccgaatgtggctttgaagatagtaactattttagcgtggtgtttacccgggaaaccgggatgacgcccagccagtggcgtcatctcaatagccagaaagattaattcgccatgccgatgccgacgatgttagcggcgacaataatcaccacacaaccgaggctcaacaccgttaccggacggcgtcctgcattgttccactctttcagcaccagcccgacgataccgccgcacaatacatagaaactcatatgcagcatccaactgatgtagtcatactgcgccggaatgcgggcgtggccccaggcatagaaaaagaattgcagataccacatcaacccgcccagtgtgctgagtaacacattgtgaatgatcaggctttttgccaggctgaagtcggcttttaggctcaaatccttcacttttgccagacgaataaaacagaaaccgaggttaatgatcgcgccgccgcccatgatgacaacatagcttggcagagcgacatacagtggatcgacgccaagtgcggcagcggcttcatgcatcggttttgcggcgttcatcgcaaaggacatcccggcagagaaaatgccgcacatcaccgccagcaccagcccttttttcagattgaactcttcggctttaatgcccatcttgcgctctttcaactgcccggcgcgagttacaatccctacgccaatcagcgccaccagaacgccgagcaacgtcatgcgtccgccttcggtgctaatcaacacatcgaaattgccgttgataattggcgtcatcagcgtaccgacaatcaacgtaatgccaatggcgatgccaattcccatgctcatgccgagataacgcatggtcaggccgtagttgatattaccgatcccccacatagcgccgaacagaaaaacaggcagtcgcgtagagagactaaagctgctgtaatacgcccagaaattcggtagtaacagggcgctgatggcccacggcagaataatccagctaacaatcccaccgacactccacatggtttcccaactccatttttttacttttttgaacggagcgtaaaaacaggctgcactggccgcgccgatcaaatgccaaaatatccccatcgtaatcgcgttactcatcttcttatcctcatcatttttcgtcgcgtcacatctccgacgagatgagtgtaaaaatcgtgctgtcgattaacctttcgcctgttgccgccgttgtcgatttactggcaatcacggcattaagtgggtgatttgcttcacatctcgggcattttcctgcaaaaccatacccttacgaaaagtacggcattgataatcattttcaatatcatttaattaactataatgaaccaactgcttacgcggcattaacaatcggccgcccgacaatactggagatgaatatgagctataccctgccatccctgccgtatgcttacgatgccctggaaccgcacttcgataagcagaccatggaaatccaccacaccaaacaccatcagacctacgtaaacaacgccaacgcggcgctggaaagcctgccagaatttgccaacctgccggttgaagagctgatcaccaaactggaccagctgccagcagacaagaaaaccgtactgcgcaacaacgctggcggtcacgctaaccacagcctgttctggaaaggtctgaaaaaaggcaccaccctgcagggtgacctgaaagcggctatcgaacgtgacttcggctccgttgataacttcaaagcagaatttgaaaaagcggcagcttcccgctttggttccggctgggcatggctggtgctgaaaggcgataaactggcggtggtttctactgctaaccaggattctccgctgatgggtgaagctatttctggcgcttccggcttcccgattatgggcctggatgtgtgggaacatgcttactacctgaaattccagaaccgccgtccggactacattaaagagttctggaacgtggtgaactgggacgaagcagcggcacgttttgcggcgaaaaaataatcatttgccgcctgctgcaatgaggcgtataggccgcatatcagcttaaaaaatgaaccatcgccaacggcggtggtttttttgtgatcaatttcaaaataaaaacaatgatccgataaaaataaaacagcgtttcaattgatgtggttttgatcacttttattgattaaatgaatgtctatcttcgtttccatcaacactgatgctccattgaggaattacgcatcagcccttaaaaatatgccgacaggtgatggaaatgcagataaagcgcagcattgagaaaatcccggggggggatgatgctcgtcccgctattccttggcgcactgtgccacaccttcagcccgggggcggggaaatattttggaagtttcaccaacgggatgattaccggtacggtgcccattctggcggtgtggtttttttgcatgggggcgagtataaaattaagcgcgacgggaacggtactgcgtaaatccggtacgctggtggtaactaaaattgccgtcgcgtgggtggttgcggcaattgccagccgtattattccggaacatggtgttgaagttggattctttgccggacttagtacgctggcgctggtggcggcgatggatatgaccaatggcggactttacgcttccatcatgcagcagtacggcacaaaagaagaagctggggcatttgtgttgatgagcttggagtccgggccgctcatgacgatgattattctgggcactgccgggattgccagctttgaaccgcatgttttcgtcggcgcagtattaccgttcctggtgggctttgccctggggaaccttgaccctgaattgcgagaatttttcagcaaagcggtgcaaacgctgattccattctttgccttcgcgctgggcaataccattgatttgactgtgattgcccagactggtttgctggggatcctgttgggtgtggcagtaattatcgtgaccggtattccgttgattatcgccgataaattgattggcggtggcgatggcactgccggaattgccgcttccagttccgcaggggccgcggtagcgacacctgtgctgattgcagaaatggtgcctgcgtttaaaccgatggctccggcagcaactagcctggtagcgacggcggtcattgtgactagcattctggtgccaattcttacctctatctggagtcgtaaagtcaaagccagagcagcgaaaatcgaaattttaggtacggtgaaataaacctgcttccttaatccccacagccggatgaactaacgttcgtccggtttgctattgagttcctgcctggatacttaccgcgaaaacagcacgcctgacataaaataaatatggtctaatggggaaatttctcgtggagagggaacagatgcgatatccggttgatgtatacacaggcaagattcaggcttatcccgaaggcaaacccagcgcaattgctaaaatccaggttgatggtgagttgatgctgacggagctggggctggaaggtgacgagcaggcggagaaaaaggttcacggcgggccagacagagcgctgtgtcattatcctcgtgagcattatctctactgggcgcgggaatttccggaacaggcggagttgtttgttgcgcctgcgtttggtgaaaacctcagtaccgacggcctgacggaaagtaatgtttatatgggcgatattttccgctggggagaggcattaattcaggtcagccagccgcgcagcccttgctataaactcaattaccattttgatatcagcgatatagcgcagttgatgcaaaacacaggtaaggtggggtggttgtatagcgtgatagcgccagggaaagtgtctgcggacgcgccgctggagttggtttcccgtgtcagcgatgtgaccgtgcaggaggctgccgccatcgcatggcatatgccgtttgatgacgatcaatatcaccgtttactctccgctgccgggttaagcaaaagctggacgcggacgatgcaaaagcgccgactgagcggcaagatcgaagatttttcccgccggttgtggggaaaataacccccggagtgtaggcctgataagacgctatcagcgtcgcatcaggcatcctgctcaaatgccggatgcggcgtaaacgccttatcctgcctgcaaatgcgaagtttaactccgcttatacagcggcaaccaaatcaccagccgtaaaccgcccagcgggctgtcttctgccttcacccagccacgatgctgctgaatggcggtttcaacaatcgccagccccaaacctgtaccgccagattcacgatcgcgtgcttcatcggtacgatagaacggacggaaaatctgttcgcgatcttccgggctaacgccaggaccatcgtcgtccaccgtaatggtgataccgtctttatctaccgcaaagcccacttcaatcttcgtatgggaataacgcagagcattacgaacaatgttttccagcgcactttccagggcgttcggattgccgtacagcggccacggcccaggcgggaagttaactgtcaagctcttgcccatttgctcggcttcgaacgccgcgttatccagcacttcactccacaactggttggctttgatggtttcgctaaccagcgcgtttttttgctgattacgactcatcaccaacagatcgttgatcatgctgtccagacgttgcgcttcggtttcaatacgctccagttccttgctttcaccgctacgacggcgcagtaacgccgtacccagttgcagacgcgtcagcggggtgcgcagctcgtgagagatatcagaaagcagacgctgctgagaggtcatcatgcgctccagcgcggtgaccatctggttaaaactggcacctgcggcaaggaattcctgtggccccgcttccagttccgggtgctggcgtaagtttccctgggcaacttcatcggcagcgtttttcagcttacgcgccggttttgccagactccaggccaaccacaacagcagcggcgtactgaccaacatggtgacaatcagcagtaatagcgggcggtcaaacagtaagttaatgaaatcggattgagaactgctggccggacgaatcagataaagttggtaattatcttcgccatcacgcacggagaacggaccgaccagttccacgcggccatactttttcttctgcggatgatcggcgttatcggcctgaccaataaagttacgaatgatctgcatttcgctgcgttcagcgccgatcacgcggccttcggtggtcaccaataacaaacgctgtcctggcggtgcccacttatcaatcgcccggaacagacgccgccaccacattaaatcgttgggcggatcgttcgccagctccgcttcgacatgctgctcaatcatcagcccctgacgctgttcgctatccagaagctcggtcatctggcgactatcgagcttgggtaacatcaaaaccaacatcaacaccagcgccagcgtcagccagaagatggcgaagatgcgcgcggttaagctgcctatcatgaagcagaaaccatcagatattagctcaactagcagaaaccatcagatagccgcgaccacgcaaggttttaaaccacgggtgaccatctttacgatccggcagtttacgacgcaggttggaaatgtgcatatcaatagcgcggtcgaaaggcgtcaggcgtttgcccaacacttcctggcttaaatgttcacgggaaaccacctgacccagatgctgtgccagcaaatagagcagggtaaactcagtaccggttaactccagcgtttgcccgtcgaagctggcttcctgacggcctggattcagcactaaggcatcaacttccagtgtcggactaccgttgtcgttgttttgctgttgctcgctccagtggctacggcgcaggatcgcgcgaatacgtgccaccagctcacgatcattaaacggtttcgggagatagtcatctgcgcccagctcaaggccgagaacgcgatcaagttcactgccgcgcgccgtcaacataatgacaggcgtctggtgtgtctggcgaagtgcttttaatgtgtcgataccatttttcttcggcatcattacgtcaagcaaaagtaaatcaatgctgtcgtccagaagatcaagcgcctgttccccatcgtgggcaacaatcacgttgaagccttccatctcgagcagctcctttaatagggaagtcagctctcggtcatcatcaactaacaggattttattcattgtttaaatacctccgaggcagaaattacgtcatcagacgtcgctaatccatgactttacgttgttttacaccccctgacgcatgtttgcagcctgaatcgtaaactctctatcgttgaatcgcgacagaaagattttgggagcaaatgatgcgcatagttaccgctgccgtcatggccagtacgctggcagtcagtagtttaagccacgctgctgaagtcggtagtggcgataactggcatccgggtgaagaacttacgcagcgcagtacgcagagccatatgttcgacggcataagtttaaccgaacatcagcgtcagcagatgcgagatcttatgcaacaggcccggcacgaacagcctcctgttaatgttagcgaactggagacaatgcatcgccttgtcaccgcagaaaattttgatgaaaacgctgtgcgcgcacaggcagaaaaaatggcgaatgagcaaattgctcgtcaggttgagatggcaaaagtccgcaaccaaatgtatcgcctgttaacgccggagcagcaagcggttttaaacgagaaacatcaacaacgaatggagcagttgcgtgacgtgacgcaatggcaaaaaagtagtagcttgaagctattgagtagtagcaacagtcgttcccagtaataaaccctgttttccttgccatagacaccatccctgtcttcccccacatgctgtgggggtttttttatcctcaatttgcctgctgcttaatgcattgcagatgatttgcttccgttatactagcgtcagttgatagcgggagtatttatgaatcaatcttatggacggctggtcagtcgggcggcgattgctgcgacggcgatggctagcctgctattgctgattaaaatttttgcatggtggtataccgggagcgtgagtattctcgccgcgctggtggatagcctggtggatatcggcgcgagcttgacgaatttattggtggtgcgatattccctgcaacctgccgacgataatcacagctttggtcacggtaaagctgagtccctcgcggcgctggcgcaaagtatgtttatctccggtagcgcactattcctgtttttgacgggtattcaacatctgatatctccaacaccgatgacagatccaggcgtcggggttatcgtgacaattgtggcgctaatttgtacgattatccttgtcagctttcagcgttgggtggtgcggcggacgcaaagccaggcggtgcgggctgatatgctacattaccagtctgatgttatgatgaacggcgcaattctgctggcgctggggttgtcctggtacggctggcatcgcgccgatgctctgtttgcattgggaatcggcatctatattttatatagcgcgttacgcatgggatatgaggcggtacagagtttactggatcgcgcattgcctgatgaggaacggcaagaaattattgatatcgtgacttcctggccgggtgttagcggcgctcacgatcttcgcacgcggcagagtgggccgacccgctttattcagattcatttggaaatggaagactctctgcctttggttcaggcacatatggtggcggatcaggtagagcaggctattttacggcgttttccgggaagcgatgtaattatccatcaggacccctgttccgtcgtacccagggagggtaaacggtctatgcttagttaatcagtataaaagagagccagacccgcattttgtgtataaaataccgccatttggcctgacctgaatcaattcagcaggaagtgattgttatactatttgcacattcgttggatcacttcgatgtgcaagaagacttccggcaacagatttcattttgcattccaaagttcagaggtagtcatgattaagaaaatcggtgtgttgacaagcggcggtgatgcgccaggcatgaacgccgcaattcgcggggttgttcgttctgcgctgacagaaggtctggaagtaatgggtatttatgacggctatctgggtctgtatgaagaccgtatggtacagctagaccgttacagcgtgtctgacatgatcaaccgtggcggtacgttcctcggttctgcgcgtttcccggaattccgcgacgagaacatccgcgccgtggctatcgaaaacctgaaaaaacgtggtatcgacgcgctggtggttatcggcggtgacggttcctacatgggtgcaatgcgtctgaccgaaatgggcttcccgtgcatcggtctgccgggcactatcgacaacgacatcaaaggcactgactacactatcggtttcttcactgcgctgagcaccgttgtagaagcgatcgaccgtctgcgtgacacctcttcttctcaccagcgtatttccgtggtggaagtgatgggccgttattgtggagatctgacgttggctgcggccattgccggtggctgtgaattcgttgtggttccggaagttgaattcagccgtgaagacctggtaaacgaaatcaaagcgggtatcgcgaaaggtaaaaaacacgcgatcgtggcgattaccgaacatatgtgtgatgttgacgaactggcgcatttcatcgagaaagaaaccggtcgtgaaacccgcgcaactgtgctgggccacatccagcgcggtggttctccggtgccttacgaccgtattctggcttcccgtatgggcgcttacgctatcgatctgctgctggcaggttacggcggtcgttgtgtaggtatccagaacgaacagctggttcaccacgacatcatcgacgctatcgaaaacatgaagcgtccgttcaaaggtgactggctggactgcgcgaaaaaactgtattaatgatttcggaaaaaggcagattcctttaccctgaaaccgatgacagaagcaaaaatgcctgatgcgcttcgcttatcaggcctacatgaattctgcaatttattgaatttgcaaacttttgtaggccggataaggcgttcgcgccgcatccggcatggacaaagcgcactttgtcagcaatatgaggcggatttcttccgcctttttaatccctcaacatatacccgcaagttatagccaatctttttttattctttaatgtttggttaaccttctggcacgctttgctcatcacaacacaacataagagagtcgggcgatgaacaagtggggcgtagggttaacatttttgctggcggcaaccagcgttatggcaaaggatattcagcttcttaacgttagttatgatccaacgcgcgaattgtacgaacagtacaacaaggcattcagcgcccactggaaacagcaaactggtgataacgtggtgattcgtcagagtcacggtggcagtggtaaacaagcgacgagcgtaatcaacggtattgaagctgatgttgtcacgctggctctggcctatgacgtggacgcaattgcggaacgcgggcggattgataaagagtggatcaaacgtctgccggataactccgcaccgtacacttccaccattgttttcctggtacgtaagggaaatccgaagcagatccatgactggaacgatctgattaaaccgggtgttagcgtgatcacgcctaatccgaaaagctctggtggcgcgcgctggaactacctggcagcctggggctacgcgctgcatcacaacaacaacgatcaggcaaaagcacaggattttgttcgggcactgtataaaaacgtcgaagttctggattctggcgcgcgtggctccactaacacttttgtcgagcgcggaattggcgatgtactgattgcctgggaaaacgaagctctgctggcagcgaatgaactggggaaagataaattcgaaatcgtcacgccgagtgagtctatcctcgcagagccaaccgtgagcgtggtcgataaagtggtcgagaaaaaaggtactaaagaggtggcggaagcctacctgaaatatctctacagcccagaaggtcaggaaattgccgcgaaaaactactaccgtccgcgcgacgctgaggtggcgaaaaagtacgaaaatgcgtttccaaagctgaagttattcaccattgatgaagagttcggcggctggacgaaagcgcaaaaagagcattttgctaacggcggtacgttcgatcagatcagcaaacgctgatttccccaggataattatcaaacccggtggtttctcgcgaccgggttttttatttgtcacgattttgcgttacccttgcatctctttgaggtacagggaaaaaaagatgaaaaaagcgggtcttctttttttggtgatgatagttatcgccgttgtggctgccggtattggttactggaaattaaccggtgaagagagcgatacattacgtaagattgtccttgaggaatgtttgcccaatcagcagcaaaatcaaaatcctagcccatgtgcggaagtcaaacccaatgccggatacgtggttttaaaagatcttaatggcccactgcaatatctgttgatgccaacgtatcgtattaacggtactgaaagtcctttgttgaccgatcctagtacgccgaacttcttttggttggcttggcaggcgcgtgattttatgagcaaaaaatacggccagccggttcccgatcgcgcggtttctttggcgatcaactcccgcaccgggcgtacgcaaaaccattttcatattcatatctcttgtattcgtcctgatgtgcgcaaacagctggataacaatctggcgaacatcagcagccgctggttgccactgccaggtggtttgcgcgggcatgaatacctggcgcgtcgggtaacggaaagcgaactggtacaacgcagcccatttatgatgctggcagaagaagtacctgaggcgcgggaacatatgggacgctacgggctggcgatggtacggcagagtgataacagttttgtattgctggcgacacaacgaaatctactgacgcttaaccgtgctagtgccgaggaaattcaggatcatcagtgtgagattttgcgttaaggcgaagagttaaggaaagtaagtgccggatatgaaatccggcacctgtcagacttaagcctgtttagccgcttctgcagctttaacgattactgcgaaggcgtcagctttcagagaagcaccaccaaccagcgcgccgtcgatatccggctgagcaaacagttctgcagcgttagacgcgtttacagagccgccgtactgaatgatcacttgttcagcgatgttagcgtcaactttagcgatgtggtcacggatgaatttgtgaacagcctgtgcctgagccggagttgcagatttgccagtaccgattgcccatacaggttcgtaagcgataaccgcaccttcgaatgccgcagcaccctgagttttcagtaccgcgtcgatctgacgtgcgcaaacttcttcagttttgcccgcttcattttcagcttcggtttcaccgatgcacagaaccggagtcaggccctgctctttcagcaccgcgaattttttcgcgatcagttcgtcagattctttgtggtaagtacgacgttcagagtgaccgatgatgatgtactgtgcgccgatgtctttcagcatagcagcagaggtttcaccggtgaatgcgccggacaggttcaggtccacgttttgcgcacccagcatgatgtggctgccttcagcttcgcgcttcgccatatcgatatacatttccggtggtgcgattgcaaccgcacagccagcaacacctgccagctctttacgcaggttagaaaccagctcgtgaaccatgtggcggctgccgttcagtttccagttacccatcactaaaggatgtcgcattttaattctccacgcttataagcgaataaaggaagatggccgccccgcagggcagcaggtctgtgaaacagtatagagattcatcggcacaaaggctttgctttttgtcatttattcaaaccttcaaggctttcagatagcgccagcttaatcggttcaacagcgaaggtcagccccttttcgccgttgtccgcgacaacataacgcagtgcaccttctgtctcggtgtaataacgtttgtttttccccgccgttagtaggctctgcagttttttctggctttgtgttttggtcattaatggggtgagtgtgcggatcaccgctgccatgtattcctgagctttcgctttcgcggctttttgctctggcccctggatgggtagccaggtcatttgaatgcttttgatttttaaggtaccgcgctccagcgctgtagaagcatacaagttctcattaattttacttgcagcacgagtgagattggctttgtcgggactgctgtcgatggcacgaaattcgttcagtggcaggctgggattctggctgttaaagtcttctcgaaactggctgatggagagatcgaaagtaggggctccagccagcagataaggcgcggtcgttgccgtatctggtgtttgtgcatgcgcctctgttgtaacggttaatgcagaacataagagaaaaaacagcgtacaccctggcttcattgacagtaccttttgttatgactggctccgattaaaacgatatctgtcgcccttgtcaaaagggtagaatcctggaaaagacaaccatcaaggaacttacatgaccatacagcaatggttattcagttttaaagggcgtattggacgccgtgatttctggatttggataggcctgtggttcgcaggcatgctggtgcttttcagtctggcgggtaagaatctactcgatattcagaccgcggcgttttgccttgtgtgcttgctctggccaacagcggcagtaactgttaagcgcttgcatgatcgcgggcgttccggcgcatgggcatttctgatgattgtggcgtggatgctgctggcgggtaactgggcgattttaccgggtgtctggcaatgggcggtggggcgttttgtcccgacgttgattctggtgatgatgcttatcgatcttggtgcgtttgttggcacacaaggcgaaaataaatatggtaaagatactcaggatgtgaagtataaagccgacaataaaagtagtaattaacctttaatatatctcttactgctatttttttccgggattgttatttccacgatgcaaatgacaatacccggaaaatccttctgaactcttcaccttaagcaatatcaaaaaaaatggtaatccataagatcattacttgtttgttcttcccttaacggcgcattattcttaagtcgtaatcgacagagaggcgaatatacagaggtgccctatgaaagatgtcgtagataaatgcagtactaaaggatgtgcgattgatatcggtacggtgattgataacgacaactgtaccagtaagtttagccgcttttttgccacccgcgaagaagcagagtcttttatgaccaaactgaaagagcttgccgccgctacatcctctgcagatgaaggggccagcgtggcctataagattaaggatctggaggggcaagttgagcttgatgcggccttcactttcagttgccaggccgagatgattatttttgagttaagtctgcgtagcttagcttgatggagttgctttagaaggagttaaacatggcttataaacacattggcgtggcaatttccgggaatgaagaagatgccttactggtgaataaagccctggagctcgccagacataatgacgctcacctgacgttaattcatattgatgatggcttaagcgagttgtatccgggtatctacttccctgcaacagaagatattcttcaattgttgaagaataagagcgataacaagctgtataaactgacgaaaaatattcaatggccgaagacaaaactgcgtattgaacgcggagaaatgccggaaacactgctggaaattatgcaaaaagagcagtgcgacctccttgtctgtggtcatcatcacagttttatcaaccgtttgatgccggcatatcgcgggatgatcaataagatgagtgcggatttgctcatcgtgccgtttatcgataagtaaccgcttaccagtaatgctccgctgtcatatggcccggtcggcgacgtaaatgtttcgtcatctgccgggtctctttcagcaactgttgtgtatcgcgcaccatctgtggattgccgcacagcatcacatggctggtttctttattcatcggcaggccaatcgtgctttccagttccccactttcaattaatgccggtatccgtccggtgaggctccccgctgccgtttcccgactgaccaccgtctgaatgcgcagttttccttcgtagcgtttttccagttcctgcatcagtggcaaatagcttaagtcggcggcataacgtgcggcgtgcaccaggaccagatttttgaagcgatctaaatctttacctagttgcagaatgcttaaataagggccaatcgctgtaccggttgccagcatccatagcgtttcgcagtgcggcacttcatcgagcacaaagaatcctgccgcttcgctaaccacctgcacttcatcgcctggtttcagtgccgccagtcgtgggcttaatttgccatcggggacggtgaccaggtaaaactccagatcgggattatcggggctgtttacataggagtaggcgcgctggacgcgttcgccgtcgatttcaaggccaagcttggtaaattgcccggcggtaaacggaagcacgggggcgtgaacggtgagactaaacagggcgtcggtccagttctgcactttagtgactttgcctgttacccaatcagccatgtttttctcctgttttgattgacttgccttatcttcgttctccgaacaaaaaaattccagtcccgaaggactggaaggctcaatcgatcaaatcaatcagaggatgtgcacctgcatttccgggtctttgcgatccagatagtggatggactgaatgcggcgaatggtgcgactcttgccgcggatcagcagcgtttcggtagtcgcgatattgcctttgcggctaatgccttccagcagatcgcctttggtaataccggtggcagagaagatgacgttatcgctgcgcgccatatcgcccaggcgcaatactttaccggcttcgatgcccatcgctttgcagcgtgccagctcctgctcgccaatgcgacgattctcttcgttgtcgcctttgacgtcatgacgcgccagcagacgaccgttcatgtcgccatctaatgcgcggatcaccgccgcagaaactacgccttccggcgcgccaccaataccgtacagcacgtcaacttcgctgtctggcatacaggtgagaatactggccgcaacgtcgccgtccggaatagcaaatacgcgtacgccgagttgctgcatttcagcgataacggcatcgtggcgtggtttagccagaatcgttaccgtcagttcgctcaacggtttgccgagcgccgccgctacattgcgcaggttatccgccagcggcaggttcagatcaatggtgcctttggctcccggcccgacaatcagcttctccatatacatatccggcgcattgaggaagcagcctttatcgcctactgccagcaccgccagcgcgttagcctggcccatcgccgtcatgcgcgtgccttcaatcggatcaacagcaatatctaccgcgtcgccgcgaccagtaccgactttttcaccaatgtagagcatcggtgcttcgtcgatttcaccttcaccaatgacgatggtgccgtcaatgttgacctggttgagcataatacgcatggcgtttaccgccgcgccgtccgcggtgtttttatcgccgcgtcctaaccatttgtagccagccagcgccgcactttcggtgacgcgggaaaattcgatggcaagttctcgtctcatagcaaactctaagcagtaaggaatggcgcgaagtgtagcacaggggaagggagggattattgatgtgtgcggggttgcccccgcacgtttcgggactaccggatgcggcataaacgcttcattcggcatttacattattcgtcgtgttcttcccacgccatcgcgcgtttaaccgcttttttccagcctgcgtaacggtaattacgctcagtggtttcgatgcctggacggaactcgcgctcaatcaccgctttctcttgcagctcgtcgaggttctgccagaagccaaccgccaggcctgcgagataggccgcacccaatgcggtgacttcgcgcacttccgggcgctcaacgcgggtgccgagaatatcggactggaactgcatcaggaaattgtttgctactgcgccaccatccacgcgcagggcgtgcagacggataccagagtcggcctgcatcgcttccagcacgtcacgcgtctgataagcaatagactccagcgtcgcgcgtataatgtggttagcgttcaccccacgagtcagaccgaaaatcgccccgcgcgcatacgggtcccagtacggcgcacccagcccggtaaatgccggaaccacatacacaccattggtgttttgcactttggtggcgaaatattcggaatcgtaggcgtcgttaatcaacttcatttcatcgcgcagccactgaatggatgcgcctgccataaacaccgcaccttccaacgcatagttcacttcgccagtcgggccgcaggcgatggtggtcagcaggccgttttcacttttcaccgctttctcgccagtgttcatcagcataaagcagccagtgccataggtgttcttcgccatcccttctttcacgcacaactgaccaaacagcgcggcctgctggtcaccggcgatcccggagattggaatacgcgtgccgcctttgccgccaatgttagtctgaccgtatacttcggaagaacgacgcacttctggcagcatctcgcgcggaatatccagcacttccagcattttgtcgtcccagtccagggtatggatgttgaacaacatggtacgagaggcgttggtgtaatcggtcacatggacacggccctgagtcattttccagataagccacgtatcaaccgtaccaaacagcaattcaccacgacgtgcacgctcgcgagagccttccacatggtcgaggatccacttcactttggtgccagaaaagtacgggtcaatcaccagaccggtattgctgcggatataatcttctaaaccgtcacgttttaaatgctcgcagatttctgcggtacgacggcactgccagacaatggcgttatagataggcttgccggtttctttttcccagacaatagtggtttcacgctggttcgtaataccgatagctgcaatttgatcggaactgatatcggctttcgccagcacttctaccagcgtggagctttgggtggcccagatttccattgggtcgtgttctacccaacctggttttgggtagatttgctcaaattcgcgctggctcacgctaatgatattggcatcgtgatccattacgaccgcgcgggagctggtggtgccctggtcgagcgcaacgatatattttttttcagtcatgtttaattgtcccgtagtcatattacaggctagctttttgttcactaggagttgtggtttccttttcttccacaacacagatatcgcaaggcaaatggcgaccaatcagtttgcggtaggcaaatgcacctacaatcgcgccaacgatagggccgaaaagcggcaccaggaagtaaggaatgtctctgccgccggtaaaggcgacattgccccagcccgccagccaggcaaagactttcggaccgaagtcacgcgctgggttcatggcaaaacctgtcaatgggcccatagatgcgccaatgaccgcaatcagtagaccaatcagcaagggagccaaagggccgcgtggtacaccgttgccatcgtccgttaacgccaggatcagccccatcagaatagcggtaatcaccatctcaactgcgaaagcctgcacaaaattgatatgaggattagggtaagtagagaaagtgccagccagatcaacactttcaacgctgccgcgaacaatgtgatgagtctgctcgaagtcgaaaaataaattgtagtaaagcccgtaaactaaagccgcagcacagaaagcgccggcaacttgactaacgataaaaggaataactttgcgcttgtcgaaacaggcaaacagccacaatgcaatggtaacagcgggattaagatgcgcgccggaaacccctgcggtcaggtagatggccattgccacccccagtccccaaatgacactgatttcccactgaccaaaagacgcaccagcgacttttagtgctgcaacgcaacccacaccgaagaaaatcaacaacccggtaccgaggaattcagcaatgcactggcctttcaaggtacttgtttgactcataatcggatcctgaagagttaatgtttgttgtatgcgtgaaagtcacggacctccacgatgcttgtaggcatgctgtaaacttatcgttaacgagcaaaaacgagaaatatcgaacttaaaatgtgtgtgcctcgtcataaaatgagcgttatcgcgccatttattccatctgattgtacatgatgcatgtttgttagatcattcgcgcaacaaatttattaacattttcgattgatgtggattatgtcaccaggagaaggatgaaaagtgtggcaaaccgtaatctgcaaggcgtgccgctggacagcgatggcgcggcttcatacaatcggagctaactaaagtgcgctcgtatttattaaggcgtcaccggtaatcgggacgaggatttttatccatcaacgccttgcaattcaggagaggtatgacaatgagtttagaagtgtttgagaaactggaagcaaaagtacagcaggcgattgataccatcactctgttgcagatggaaatcgaagagctgaaagaaaaaaacaacagtctgagccaggaagttcaaaatgcccagcatcagcgcgaagagctggagcgtgagaacaaccatctgaaagaacagcagaacggctggcaggaacgtctgcaggccctgctgggtcgcatggaagaggtctgattacgcttcatcttccgcgtaatttctttactgtgtaggccaacaggtaacgcagaaaaaaggcaccttgcggtgcctttcttatcattcaatatccagcggatcttcactaagaataatcccggtattgtcggcataaagatggtcgccggagaagaaggtgacaccgccaaaattgacgcggacatcgctttcgccaatgccttcgccagcggcaccaaccggaattgccgccatcgcctggatgccgatatccaactcttccaggtcatctacctgacgcaccgcgccgtaaatgaccagaccttcccattcattttgtactgccagacgcgccagttcagcatcgaccagtgcgcgacgaacagaaccaccgccatcgacgacaagaacacgaccacggccattctgttcgagcagatcgtacagcaacccgttgtcctcgaaacattttaccgtgattatttgtccgccaaagctcgcccgtccgccaaagttggagaacagcggttccacgacgttaacatcttcttgatagatgtcacaaagctcggaagtatcgtatttcataggcttaacattcagttgctgcgagaattttcagtatatcgcgctatgtgggctgttggcaaaatcatcaattgttaattgatatttgtcagttatgctgcccactggcttaggaatatccctaaaacaaacagcaggttagtcagtaacgctcccttgacagtacgttccagcattggtcgcatcgccaccgggtccatttcccgcatcacataacgggcttgcttcaccagtaatggtgccgccagcaggaacagccagccccacaggctatgcaggctaaagagattaaacagcgccagacacaccaggctgcccatcagcaggcaggcatgataacgacgcgcgttcacttcacctaagcgcaccaccagcgtgtttttgccattttcgcggtcgctattgatatcacgcaggttattaatattcagtactgccgttgccagcaggccgcatgcggtcgccggaaggatcagtgccggaatcaatgtatgagcctgtaaataccagctccccatgacactcaaccagccaaagaaaaccagtacggaaatatcacccagaccgatataaccataaggacgattgcccacggtgtaggtgatagcggcaatgatgctcaacccgccaagaatcaggaaaccgacaaaatcggccagcgtatggcatgccactgcaaccagtgccagcccggagagacagatgagcacgacggtaataatgagcgcccgtttcatctcttgctgggtaatgacccctttttgcatgccgcgtagcggcccaatgcggtcaggtttatcgctgccttttaccgcatcgccgtaatcattggcgaggttagaaaggatctgtaatagcccggcggtaattagtgccagcagggcgaccagcggatcgaagtgaccttgccaccatgccagcgctgtcccgacgataattgcagcaaaggcgagggggagggttttaggtcgtaaactttccagccacgcctgagttcggctaatttgttgttcagtcataatacgcgccaataaaaatggggcctttcagccccatcaaacaatgatgaaaatgattgaacgcgattataggataaaacggctcagatcttcatctgccaccaacgcatccagatgtttgctcacataatctgcgtcaatagtgatattttgaccgcttaaatcgctggcgtcgtaggaaatctcttccattaaacgctccagaacagtgtgtaaacgacgagcaccgatgttttcggtagattcgttcacctgccatgccgcttccgcgatgcgtttaataccggagtcggtaaactcgatatttacgccttcagtcgccatcagtgctttgtactgcacggtgatagaggcattcggctcggtcagaatacgctcgaagtcgctggtggtcagcgcctgcagttcaacgcggattggcagacgaccttgcagttccgggatcaggtcagacggtttcgcaatctggaacgcgccagaagcgataaacagaatgtggtcagttttgaccatcccgtgtttggtggaaacggtgcaaccttctaccagcggcagcaggtcacgctgaacgccttcacgagaaacatccggaccggaagactcgccgcgcttacagattttgtcgatttcgtcgataaacacgatcccgtgctgctcaacagcgtcgatagcgtcttgcttcagctcttccgggttcaccagtttcgccgcttcttcttcaatcagcagcttcatggcgtctttgattttcagcttacgcgctttttgcttctggccgcccaggttctggaacatggactgcagctggctggtcatctcttccatgcccggaggagccataatttcaacgcccatcggtgctgcggcaagatcgatctcgatttctttgtcatcaagctggccttcacgcagttttttgcggaatgcctgacgagcagcggacggttcctgctgctgttcggtctgtccccagttgtttttagcaggtgggatcagcacgtcgagaatacgttcttctgccagttcttcagcgcgataacggtttttctcgatagcctggacgcgtaccattttcacggcggcatcggtcagatcgcgaataatagaatccacttccttaccgacgtagcccacttcggtgaatttggtcgcttcaactttgatgaacggcgcattcgccagcttagccagacgacgggcgatttcagttttaccgacaccggtcgggccgatcatcaggatatttttcggggtcacttcatggcgcagctcttcgttgagctgcatgcgacgccagcggttacgcagagcaatcgccacagaacgcttggcgttgtcctggccgatgatgtgcttatccagttcgctgacgatttcgcgtggggtcatttcagacatgggagatccttacgctttgtagcttaattcttcgatggtgtggaaatggttggtatagatgcaaatgtcgcctgcaatatccaacgccttttcagcaatttcacgggcgctaagttcagtgttttctaacagcgcgcgcgccgcagcctgggcgtaagggccgccggagccgatagcaataagatcgttttctggctgcaccacgtcaccgttaccggtgatgataaggcttgcagtttcatccgcgactgccagcagtgcttcaagtttgcgcagcatgcgatcggtacgccagtcttttgccagctcaacggcggctttgaccagatggccctgatgcatttccagtttacgttcaaacagttcgaacagcgtaaaagcatccgcagtaccgcccgcaaagcccgcgatgactttgtcgttgtacagacggcggacctttttcacgttgcctttcattacggtattgcccaacgtggcctgaccatcaccagcgatgaccacatggccgttacggcgtacgcttactatagttgtcacgagctgaccccttggttacgaatacagagtacaaaccccgtacaaaagtacggggcataatgcaattatagatgggggggattttgagggtttcaacccccggcggcgagccgaatgcagtttgtatgacccgccatcttcaaccgattgagggtgctgtctgcgttctctttgcctttcaccgggccaatgaccacacgattccagccattgttggtggtgattttgctgtcaaagccttcgaacgccagctgagcacgtaccgtctctgcctgttccgcgcctctgaagctaccgcactgcaccatccagcggcgttcgtcttttttctccgccgtcggttttggcgcgtcagcggcacgagcaactggcgcagcttgctgcggcttgctctgcgcagtcgtgtgcgcaggagtttgcagcagatcctggtacggctgctgagaagaagccggtttagactggcgcggttgcgcctgtaccggtgcggcttggctcgtacgcgtctgctgctgccagctttgttcagtcgtacggctctgctgagccaggcgttgctgttccgctaattgctgcgcctgacgttggcgctgtagcgtttgctgacgctgttccggcgtctgttcattccacggaacttcaaccagctgcgttggctgctggcgcatatcagcctgcatttgttcaagaagctgacgttgttctggtgtcagttgctccggcgttttcacttcaccaccggcagaaggttctgtgggcgcacgcactcccggctggcgactttccagctctttaatgtagcgccagcgttcttctggttttggtggtagtccgtttccggtcactttctggctttgcagcgtctcggactcttctttcttgtgatgcgtaatgaagtacagaccaccgataaaggtcacaagaacggcggcagcaatagcgaccatagcgggagaaaccgcaggcagatttcgttgctttttccgactggtgctcttttttcgccggctaggtgccggttggctgcggcgtacataatctcgttgtgccactatcgtttcgctgtatttattcgttcgtcagcccgccatgttacttaagcggcgggcctttgaccagtcacggcagtcttaaaggtttactttaaggtaacgcgcgtgtacttccccggatgataagttcgcagtccattaaacgagagccactgccaacgtgttgcccctgcatttgatcaagcaataacagcatagcttcccgaccgatttcgtaacgcggctgcgcgatggttgtcagcggcggatcacaaaattgcgtcaggtcgatgttatcaaaaccgattatggaaaggtcttccgggactttcagcccctggcgttttgcctgagaaagtgcgccgagcgccatcacatcgctatggcagaagacagcagtaggcggttgtggaagatcaagcagctgctgcatcgctttgcttccggcttcgaaggtgaagtcgccacgggcgatgtattgcggatcaaccataatgccgcagcgacgcagcgcctgaacatagccttgcaggcggtagtgacacagcggcatctcttcgggaccggctatacagccaatccgtttatgcccttgctcatataaataatttactgcatcaaatgcggcggtcagattgtcgatatgaactgtaggcagctccagctccggtgcaaattcgttcgccatcaccatcggcggcagattacgctgttcctcaatgctggcatcaaacggcagcctactacccagcaacaacatgccatcaatttgcttggtgatgatcaaatcgataaaggttttttcctgctgattttgatgcgcacagtcgccaatcagcaccagatatccgtgatttgccgccgtaacttcgataccgcgaataatttcgctaaagaagggatcgcagatatccgggacaatcaccagaatggtgcgggattcattacgcttgacgttgcgccccataggctgcggtaaataacccacttcccgggccgctttttcaacccgattacgggtggcctgggagactttatcgggattcattaatgctcgggagacggtcgctgtagagacttttgccttgagggcaacgtctttcatggtcgcggcagtttcctgcttcttcgctttcacactcactcctcgcctggcacgtcaggcgtactacatccatgtttacttcacatcggcaacatttttagcagatagcgcgtgaaaacggttacagaattttcatgaaaagtgtgatgaatattgaatttttcgatccgcctcgcatcgtgagcggtttaaccctcaatcggatcaacatccagcacccatttcaccttacgggaatccggtattgtattgatgagcgccagcgtaccgttaatgatgtgttgcaagcgcacgcgggaagggtgctgcaacaatatctgccagcgccagcgaccgccacgtttaggtgccagagccggaaccggaccgagaacccacagtttctcgtctgccagtgggctggagaggatcagattacgcagttgttgcaggaacaatggcgcgtgctgattgttatgatcttccgcacgcacaatcacatggctggtccacggcggtagctgcatcattcgccgctcagccagcgcctgttcggcaaaggcgtcgtagcctttatagagcaacgtttgcaacagaggatgttccggatggtgcgtttgcagcaccacttcgccctgtttacccgcacgcccggcacgaccggcgacctgggtgtaaagctgagcgaaacgctctgcgctgcgaaaatcggcagaaaacagcgcgccgtccacgtccagtaatgcaaccagcgtcacatccgggaaatggtgacctttcgccagcatttgtgtaccaatcaaaatccgcgcgccgccgcgatgtacttctgccagttgctgttccagcgcccctttgcggctggtggtatcgcggtcgatacgagaaatgggcacgccggggaacaacggcgcgagcgtctgttcaagctgttcggtgcccagccccacggggaccaggtgcgtggaaccgcaggaagggcactggcgcggcaccggacgctgactgtcacagtggtggcagcgcagatggtgctgcgcctgatgcagcgtgtagtagtgatcgcaacgtgggcattcggcaatccagccacagtcgtggcacagcagtgcaggcgcaaagccacggcggttaagaaagagaatgacctggttatcagcctgtaaatgctggcgcatacgagtgattaacgccggagccagacctgcctgcaccttctgaccttttaaatccagcacatgttgaattgccggacgcgcattccctgcccgacgggtcaggcgcagcaggcggtattttttctgctggacgttgcataacgtttccagcgcgggcgttgcggagccaagaataatcgggatttgctcgctgtgcgcacgatacaccgccaggtcgcgggcatgatagcgccagccttcctgctgcttgtaggagctgtcgtgctcttcatcaatgacaatcacgccgagatttttaaacggcgtaaacagcgcggagcgggtgccgatcacaatcgccgcctcaccatttttcgctttcagccacgcgctaagacgctcgctgtcgttcaggccggaatgcagaacttccacgggggcattaaaacgttcacgaaaacgggcgatagtttgcggtgtcaggccgatttccggcaccatcaccagcgcctgtttgccctgagcgagcacgttttccagtacgctgagataaacctccgttttaccggaaccggtaacgcccgccagcagccaggcagaaaaagtatctgccgcgctatgaattgcgccaacggcggtggcctgttcggtattcaatcgcaaccgctcaccagaaacggcatagttcgttcgccagtcgctaaactctggtgtttcacttgctaaatcacacagaccttttttgcgtagcgcctgcaacgcggcatcattaaattcgagcgtggcgacctggtcgcgccagattttgccttgccgtaacgccgccagcgcctgttgttgcttgggggagcgtttcaggctgttcagatccaccgcctggccttgttcagtggcaaaccagtaccacatcggcgcgttcgccgcaggccgcccctggcgtagtaaaatcggcaaggcatgaaacagcacatcgccaatcggatgatgatagtaatctgccgcccatagcagcaatcgccagacggagtgagtaaacaccggctcactatccagcacttcgactaccgcttttagctcattgagcggcagttcgctggcatcgctaacacttaccacaatcccgatgcgctcctgctgtttgccaaacggcacgcgcacgcgacacccagctttaaccgtcatgccttctggcagcagatagtcaaaggtacgaggaagcggaacgggcaaggcaacgtgggcaacgggcatagcatcatcctgacttgaaattcggtgggttagtatacacattgccgtagaagagtgcggatcagtttgcatacgctggttaatttctgtatgatttcgcgccttcgtacgaaatgatcgtattgaagctatacttttaacatcgcgtggtgtctggcgttagggctggaagagcgacgcggccttaaaccgaggttttcccatgaaaaaagatattcacccgaaatacgaagaaattactgctagctgctcttgcggtaacgtaatgaaaatccgctccaccgttggtcatgacctgaacctcgacgtgtgcagcaagtgccacccgttcttcactggcaaacagcgtgatgttgctaccggtggccgtgttgaccgcttcaacaagcgtttcaacatcccgggcagcaaataagaccggatttccgaaaaaagcgccgcacggcgctttttttgtgcctgaattttggtcgtattaccagctaaacagcggccattctttggcgaccgtggtgagttgtggcgcatcgaaaacggcttgtgggctgaccaccgtttcctcaagcggaatattcttgccgtaacgttctttgagctttgcctgaacttgtgggctgctcaggtcgaactctttcaacttctgctgctcgcccacgcgcattcccagcgcgttctggtaaaccttccacaccacttcgctacagtactggcgatcgtcgctccaactgaagctgaaatcatacggtttaccgagataacgttttgccgtttgcgccagtttttgctgttgttcaacactcagtccgccttcaacgcggcgaacaacgtatttgcccttttcaccatgggcgatccactgcttgagcggggtgtatttcaccgggccgactgcttcaaaaacgtagggctttttgttgcgtatcaccagcataccggtgtggctataatcggtatgggtcgccagttggatcgctttactttggctactgcgagagatctgaaagatgatgtcgccggtttgtggctgccaggcaaaggcaggtacagaaaccagcaggctgaggatcagcagcctgtttttcatagttaaacgtccatgtataaaaagcggtgggtcgcagacaacgtgctcgttgtttatgccggatgcggcgtgaacgccttatccggcctacaagttcgtgcaaattcaataaattgcaatatgacgtaggcctgataagcgtagcgcatcaggcgattccactccgcgccgctcttttttgctttagtattcccacgtctccgggttaatccccatctcacgcatgatctcttttgccgcttccgggatttcgtcgctgcgctctttacgcagatcggcatcatccggcaaaggttgcccggtaaaggcatgcagaaacgcttcgcacagcagctcgctgttggtagcgtgacgcaggttgttcacctgacgacgcgtgcgttcatcggtgaggatttttaacaccttaagaggaatggaaaccgtaatctttttgacttgttcactcttcttgccgtgctcagcgtatgggctgatatattcgccgctccattcagccatgagatacttaatcctcttcgtcaataaattgagaccagaccacacagttgatgtgggtactgaccgtaaacccgcatagtttaccgtacaggcgttaccgtgacatcgtgtaatgcacctgtcggcgtgataatgcatataattttaacggctatttgggatttgctcaatctatacgcaaagaagtttagatgtccagatgtattgacgtccattaacacaatgtttactctggtgcctgacatttcaccgacaaagcccagggaacttcatcacatgacgcgtaaacaggccaccatcgcagtgcgtagcgggttaaatgacgacgaacagtatggttgcgttgtcccaccgatccatctttccagcacctataactttaccggatttaatgaaccgcgcgcgcatgattacagccgtcgcggcaacccaacgcgcgatgtggttcagcgtgcgctggcagaactggaaggtggtgctggtgcagtacttactaataccggcatgtccgcgattcacctggtaacgaccgtctttttgaaacctggcgatctgctggttgcgccgcacgactgctacggcggtagctatcgcctgttcgacagtctggcgaaacgcggttgctatcgcgtgttgtttgttgatcaaggcgatgaacaggcattacgggcagcgctggcagaaaaacccaaactggtactggtagaaagcccaagtaatccattgttacgcgtcgtggatattgcgaaaatctgccatctggcaagggaagtcggggcggtgagcgtggtggataacaccttcttaagcccggcattacaaaatccgctggcattaggtgccgatctggtgttgcatagttgcacgaaatatctgaacggtcacagtgacgtagtggccggcgtggtgattgctaaagacccggacgttgtcactgaactggcctggtgggcaaacaatattggcgtgacgggcggcgcgtttgacagctatctgctgctacgtgggttgcgaacgctggtgccgcgtatggagctggcgcagcgcaacgcgcaggcgattgtgaaatacctgcaaacccagccgttggtgaaaaaactgtatcacccgagcttgccggaaaatcaggggcatgaaattgccgcgcgccagcaaaaaggctttggcgcaatgttgagttttgaactggatggcgatgagcagacgctgcgtcgtttcctgggcgggctgagcttgtttacgctggcggaaagtttagggggagtggaaagtttaatctctcacgccgcaaccatgacacatgcaggcatggcaccagaagcgcgtgctgccgccgggatctccgagacgctgctgcgtatctccaccggtattgaagatggcgaagatttaattgccgacctggaaaatggcttccgggctgcaaacaaggggtaaaaatgagtgtgattgcgcaggcaggggcgaaaggtcgtcagctgcataaatttggtggcagtagtctggctgatgtgaagtgttatttgcgtgtcgcgggcattatggcggagtactctcagcctgacgatatgatggtggtttccgccgccggtagcaccactaaccagttgattaactggttgaaactaagccagaccgatcgtctctctgcgcatcaggttcaacaaacgctgcgtcgctatcagtgcgatctgattagcggtctgctacccgctgaagaagccgatagcctcattagcgcttttgtcagcgaccttgagcgcctggcggcgctgctcgacagcggtattaacgacgcagtgtatgcggaagtggtgggccacggggaagtatggagcgcacgtctgatgtctgcggtacttaatcaacaagggctgccagcggcctggcttgatgcccgcgagtttttacgcgctgaacgcgccgcacaaccgcaggttgatgaagggctttcttacccgttgctgcaatagctgctggtgcaacatccgggcaaacgtctggtggtgaccggatttatcagccgcaacaacgccggtgaaacggtgctgctggggcgtaacggttccgactattccgcgacacaaatcggtgcgctggcgggtgtttctcgcgtaaccatctggagcgacgtcgccggggtatacagtgccgacccgcgtaaagtgaaagatgcctgcctgctgccgttgctgcgtctggatgaggccagcgaactggcgcgcctggcggctcccgttcttcacgcccgtactttacagccggtttctggcagcgaaatcgacctgcaactgcgctgtagctacacgccggatcaaggttccacacgcattgaacgcgtgctggcctccggtactggtgcgcgtattgtcaccagccacgatgatgtctgtttgattgagtttcaggtgcccgccagtcaggatttcaaactggcgcataaagagatcgaccaaatcctgaaacgcgcgcaggtacgcccgctggcggttggcgtacataacgatcgccagttgctgcaattttgctacaccagtgaagtggccgacagtgcgctgaaaaacctcgacgaagcgggattacctggcgaactgcgcctgcgtcaggggctggcgctggtggcgatggtcggtgcaggcgtcacccgtaacccgctgcattgccaccgcttctggcagcaactgaaaggccagccggtcgaatttacctggcagtccgatgacggcatcagcctggtggcagtactgcgcaccggcccgaccgaaagcctgattcaggggctgcatcagtccgtcttccgcgcagaaaaacgcatcggcctggtattgttcggtaagggcaatatcggttcccgttggctggaactgttcgcccgtgagcagagcacgcttagcgcacgtaccggctttgagtttgtgctggcaggtgtggtggacagccgccgcagcctgttgagctatgacgggctggacgccagccgcgcgttagccttcttcaacgatgaagcggttgagcaggatgaagagagcttgttcctgtggatgcgcgcccatccgtatgatgatttagtggtgctggacgttaccgccagccagcagcttgctgatcagtatcttgatttcgccagccacggtttccacgttatcagcgccaacaaactggcgggagccagcgacagcaataaatatcgccagatccacgacgccttcgaaaaaaccgggcgtcactggctgtacaatgccaccgtcggtgcgggcttgccgatcaaccacaccgtgcgcgatctgatcgacagcggcgatactattttgagcatcagcgggatcttctccggcacgctctcctggctgttcctgcaattcgacggtagcgtgccgtttaccgagctggtggatcaggcgtggcagcagggcttaaccgaacctgacccgcgtgacgatctctctggcaaagacgtgatgcgcaagctggtgattctggcgcgtgaagcaggttacaacatcgaaccggatcaggtacgtgtggaaagcctggtgcctgctcattgcgaaggcggcagcatcgaccatttctttgaaaatggcgatgaactgaacgagcagatggtgcaacggctggaagcggcccgcgaaatggggctggtgctgcgctacgtggcgcgtttcgatgccaacggtaaagcgcgtgtaggcgtggaagcggtgcgtgaagatcatccgttggcaagtctgctgccgtgcgataacgtctttgccatcgaaagccgctggtatcgcgataaccctctggtgatccgcggacctggcgctgggcgcgacgtcaccgccggggcgattcagagcgatatcaaccggctggcacagttgttgtaatttcagaaatttaataatgcccggtactcatgttttcgggtttatggtttctaatgaaatatattgaattatcataggattaggccggattaagcgtttacgacgaatccggcaagaagcaataagtacatggttagtttatatttgcagtccggtttgctttgcataccggattttctttttcttaccatcctgaagttttttcatcttccctgatttttcctcaccatcattggtcatttttcggttgacgcccttcggcttttccttcatctttacatctggacgtctaaacggatagatgtgcacaacacaacatataactacaagcgattgatgaggtaaggtatgagcttttttcacgccagccagcgggatgccctgaatcagagcctggcagaagtccaggggcagattaacgttagcttcgagtttttcccgccgcgtaccagtgaaatggagcagaccctgtggaactccatcgatcgccttagcagcctgaaaccgaagtttgtaagcgtgacctatggcgcgaactccggcgagcgcgaccgtacgcacagcattattaaaggcattaaagatcgcactggtctggaagcggcaccgcatcttacttgcattgatgcgacgcccgacgagctgcgcaccattgcacgcgactactggaataacggtattcgtcatatcgtggcgctgcgtggcgatctgccgccgggaagtggtaagccagaaatgtatgcttctgacctggtgacgctgttaaaagaagtggcagatttcgatatctccgtggcggcgtatccggaagttcacccggaagcaaaaagcgctcaggcggatttgcttaatctgaaacgcaaagtggatgccggagccaaccgcgcgattactcagttcttcttcgatgtcgaaagctacctgcgttttcgtgaccgctgtgtaagcgcgggcattgatgtggaaattattccgggaattttgccggtatctaactttaaacaggcgaagaaatttgccgatatgaccaacgtgcgtattccggcgtggatggcgcaaatgttcgacggtctggatgatgatgccgaaacccgcaaactggttggcgcgaatattgccatggatatggtgaagattttaagccgtgaaggagtgaaagatttccacttctatacgcttaaccgtgctgaaatgagttacgcgatttgccatacgctgggggttcgacctggtttataaatagtgtggcttttgtgaaaatcacacagtgatcacaaattttaaacagagcacaaaatgctgcctcgaaatgagggcgggaaaataaggttatcagccttgttttctccctcattacttgaaggatatgaagctaaaacccttttttataaagcatttgtccgaattcggacataatcaaaaaagcttaattaagatcaatttgatctacatctctttaaccaacaatatgtaagatctcaactatcgcatccgtggattaattcaattataacttctctctaacgctgtgtatcgtaacggtaacactgtagaggggagcacattgatgagcacgagtgacgatatccataacaccacagccactggcaaatgcccgttccatcagggcggtcacgaccagagtgcgggggcgggcacaaccactcgcgactggtggccaaatcaacttcgtgttgacctgttaaaccaacattctaatcgttctaacccactgggtgaggactttgactaccgcaaagaattcagcaaattagattactacggcctgaaaaaagatctgaaagccctgttgacagaatctcaaccgtggtggccagccgactggggcagttacgccggtctgtttattcgtatggcctggcacggcgcggggacttaccgtagtatcgatggacgcggtggcgcgggtcgtggtcagcaacgttttgcaccgctgaactcctggccggataacgtaagcctcgataaagcgcgtcgcctgttgtggccaatcaaacagaaatatggtcagaaaatctcctgggccgacctgtttatcctcgcgggtaacgtggcgctagaaaactccggcttccgtaccttcggttttggtgccggtcgtgaagacgtctgggaaccggatctggatgttaactggggtgatgaaaaagcctggctgactcaccgtcatccggaagcgctggcgaaagcaccgctgggtgcaaccgagatgggtctgatttacgttaacccggaaggcccggatcacagcggcgaaccgctttctgcggcagcagctatccgcgcgaccttcggcaacatgggcatgaacgacgaagaaaccgtggcgctgattgcgggtggtcatacgctgggtaaaacccacggtgccggtccgacaagtaatgtaggtcctgatccagaagctgcaccgattgaagaacaaggtttaggttgggcgagcacttacggcagcggcgttggcgcagatgccattacctctggtctggaagtagtctggacccagacgccgacccagtggagcaactatttcttcgagaacctgttcaagtatgagtgggtacagacccgcagcccggctggcgcaatccagttcgaagcggtagacgcaccggaaattatcccggatccgtttgatccgagcaagaaacgtaaaccgacaatgctggtgaccgacctgacgctgcgttttgatcctgagttcgagaagatctctcgtcgtttcctcaacgatccgcaggcgttcaacgaagcctttgcccgtgcctggttcaaactgacgcacagggatatggggccgaaatctcgctacatcgggccggaagtgccgaaagaagatctgatctggcaagatccgctgccgcagccgatctacaacccgaccgagcaggacattatcgatctgaaattcgcgattgcggattctggtctgtctgttagtgagctggtaagcgtggcctgggcatctgcttctaccttccgtggtggcgacaaacgcggtggtgccaacggtgcgcgtctggcattaatgccgcagcgcgactgggatgtgaacgccgcagccgttcgtgctctgcctgttctggagaaaatccagaaagagtctggtaaagccagcctggcggatatcatagtgctggctggtgtggttggtgttgagaaagccgcaagcgccgcaggtttgagcattcatgtaccgtttgcgccgggtcgcgttgatgcgcgtcaggatcagactgacattgagatgtttgagctgctggagccaattgctgacggtttccgtaactatcgcgctcgtctggacgtttccaccaccgagagtctgctgatcgacaaagcacagcaactgacgctgaccgcgccggaaatgactgcgctggtgggcggcatgcgtgtactgggtgccaacttcgatggcagcaaaaacggcgtcttcactgaccgcgttggcgtattgagcaatgacttcttcgtgaacttgctggatatgcgttacgagtggaaagcgaccgacgaaagcaaagagctgttcgaaggccgtgaccgtgaaaccggcgaagtgaaatttacggccagccgtgcggatctggtgtttggttctaactccgtcctgcgtgcggtggcggaagtttacgccagtagcgatgcccacgagaagtttgttaaagacttcgtggcggcatgggtgaaagtgatgaacctcgaccgtttcgacctgctgtaatctgaccccgttcagcggctgcttgctggcagtcgctgaacgttctttaccagcgtatagtgggcgaacgaaaactacacactggatctctcatgtctgccgcaggaaagagcaacccactggcaatcagtggcctggttgtgctcacacttatctggagttatagctggattttcatgaagcaagtcaccagttacatcggtgccttcgactttaccgccttacgctgcattttcggcgctctcgttttattcatcgtccttttattacgtggtcgcggaatgcgcccgacaccgtttaaatacaccttagccattgccctgttacaaacctgcgggatggttggtctggcgcagtgggcgttggtcagcggaggtgcggggaaggtggcgatcctgagctataccatgccgttctgggtggtgattttcgccgcgttgtttctcggtgaacgcctgcgacgtgggcaatatttcgcgattctgattgccgctttcggcttatttttggtgttgcagccgtggcaactcgatttctctagcatgaaaagtgccatgctggcaatcctctccggcgtcagttggggggcgagcgcgattgttgctaaacgtctgtatgcccgtcatccgcgcgtggatttattgagcttaacatcctggcagatgctgtatgcggcgctggtgatgagtgtggtcgctttactggtgccgcaacgtgaaattgactggcagcccaccgtgttctgggcgctggcctacagtgcgattctggcgacggcactggcgtggagcttatggttgtttgtattgaaaaacttgcctgccagtattgccagcttaagcacactggccgttcccgtttgcggcgtactcttttcctggtggctgctcggcgagaatccgggggccgttgaaggtagcggtattgtgctgattgtgctggcactggcgctggtgagccgtaagaaaaaagaagccgtcagtgtaaaaaggatctgaattttttcttcatgtggggcgatctcttatttaacaaaataacgataatgccccaccatccgccagttaaacagcacatcttcttcctgcgcgcctgcgccaatgttatgtatcaccagcggcgtaccgtcgcgggcgaagccatcactaaccaccccaatatgtgccagcccgttatccagtcgccaggagacaatatcgcccgcttgatagtcactggggttcttgctggtggggcgtgttttatcatggcggctaaaccaggtttccagattaggcacccgacggtgatcgatgttgctgtccgggcgctttaacttccatttttgcgggtactcagcaaaattcttcgccatatcttcgtgaaccagtttctgcaaatcgaccttctggctgcgcaatgcgcggatcaccacatcggaacatacaccgcgttcttgcggaacatcaccgccaggataagtaagctgcacatacgccggatcgtaaaatagcgtgctgccaatttgctgtctggcaccgtctgcgatggcaaggttggtattggcctggatttgtaccacggttggtggaacggcgggagattttaaggagtggctggtaaatgccgttagcaggctgagcagcgccagactagctttcatctggttcgtccgtgaaaataagagtcacagattcgaccttccgggctaacgattgttctgtagagaaaatgtccagaagcggataaaaaattcctgaacaacgtgggagtttcagattactggcacagagtgccggatgcggagtgaacgccttatccggcctacaaaagcacgcaaattcaatatattgcagagattgcgtaggcctgataagcgtagcgcatcaggcaattttgcgttcaaactcccggacaagccgggagtttggagtaggttattcccactcttgcaggaaacgctgaccgtactggtcggctaccagcagagcggcgtaaacctgatctggcgtcgcgccgccaggcatgttgtgaatggtttcaccttctgcacatgccgcttctgccacaattcgcattttcgccgggacatcttctttaatatccagttgagcgagagttattggcaaacctaccgcatggctaagggcagctacggtttcgatttcctccaccggcgcattttccagaaccagctgcgtcagcgtaccgaatgccactttttcaccgtgataatagtgatgcgcgtccgggatagcggtcaggccgttatgcactgcgtgcgccgcagccagaccaccactttcaaaaccaacaccgctcaaataggtgttcgcttcaatcacgcgctccagcgccggagtcactacatgctgttcggcagcaagcatcgctttttcgccttcttccagcagggtgttgtagcacagttcagccagtgccagcgcagcctgggtgcacttgccgcccgccatggtggtcgcgccgctacgagagcaggcacgcgcttcaaaccaggttgccagcgcatcgccgatacccgccgctaacagacgtgcaggtgcgccagcgacgattttggtgtcgacaatgaccatattcgggttatttggcaacagcagatagcggtcaaactcaccctcatcggtgtagataacagacaatgcgctgcacggtgcatcggtagaggcgatagtcggtgcgatcgctaccggaacacccatgaaatgtgccagtgctttggcagtatcgagggtttttccgccaccgataccgagaattgcgccacactgcgcagtctccgcgatgccacgcagacggtcgatctcattttggctacattcaccgccaaacggcgcaatttctactaccagtccagcatctttaaagcttttctcgacagtggattgagcaaaacctaaaacaaatttgtcacccaccactaaccagcgttctgccagcggcttcaggtattcgcccagacgattaatcacatcagcgccctggatgtatttacccggactttgaataatgcggtccataattgctcctttagagatgagtagtgccaaatgcggcattccagtcgtgttcgaacttctctatagcactctctaccgcaggggtgttgagcatttgttgcgctacatctaagggcagggtgatggattcacatcctgccagtaaacagtccagcgcctgacgcggcgttttaaagctggctgccagcaccatgctttctggcgcgtgcatttctaacagcgtttgcagctcctgaaccgtacgaatgccgtctccgccctgggcatctacgcggttaacatacggagcaacgtattttgcccctgccagtgcggctaataacccttgtgcggcgctatatacagcagtgccaagtgtagtaataccctcttttttcagtattttaattgctgccagaccttcggaagtcaccgggattttcaccacaatacccggaatagcgtcgcgcaggcgcttcgcttcttccaccatcccctgcgcgtcgcggctcatggtctgagcaaacagaatgccctcatcaccaatcgctttttgcagacgcggcagcacttcccatatggactccttgctggcagcgataatgctcgggttagttgtcaccccggcaatggggaatatgcgtgccagacgttcgacttctgcgacgttagcggtgtccagatacagttccatgatgtttccttttacagttccagttcatgttgcagcaggctggcgatagcgtcggcagaggcggcgttaaccagcgcgttacggaattcttcgtgcatgatgcggcgagcgaggcggctgaaaatgcgcatatgctgatcgcccgcagcgtgtttgttcagggttaacataatgatgaattgcgcttcatcatcgccccagcgcaccggcgcttgcagacgcgccacgctgatggtggattgctcaatgtgttcacttttgctgtgtggaatggcaaaactaaagcccagaccggtagagaaaacggcctcgcgcgcccacaagtcggcttccagtttacgcggatagcggcagcggcccgccagcagcaggttatcggtcatgcctttgagcacttcttctttgctgcgccagtcgctttccagtgtgatgcactcggcggtgaccagcggtgcgtcttgttgggtcatgcggaattgcgccagcaggtgttctacttccaggctagtacggcaggccattgcctggttgagcaacttgcggcactcacggctatcaagttgcgccatccgagctttcgccgccggaatacttggtgcgctcatgctgagttcatccagccctaagccgaccagcaacggcagcacggaacctttcgctcccagctcaccgcacagaccaatccatttgccctggcgatgcaccgcttgcacggcgtaatcgagcgcccgcaagaatgccggattcaggctgttgtagtgacgagtaaccttagcgttatcgcgatccaccgccagcagatactgcgtcaggtcattactaccaatactaaagaaatcaatctcttcgcagcattgatcgatgatgaacatcacgctcggcacttccagcatgatgccgagctggattttctcatcaaacggaatgtgttcgttacgtagttgctgtttggcttccgccagtttttctttcacccataagatctcttccatactggagatcatcgggatcatgattttcaggctgccgtgagcggaggcgcggaggatgctccgtagctgcgtggtaaacaagctcgcgtactcttcataaatacgcacggcgcgataaccgaggaacgggtttgcctctgcgggaatgttcagataatcaacgggtttgtcgccgccaatgtccatagtgcgcacaataatgctgcgtccgttggcggattccagcgcctgacaaaaaatgttgtacaactcgctttcgcccggtgcgctggtgcgatccatatagagcatttcagtgcggaacaaaccaacgccttccgcaccattgccgaatgcggcctgcgcttccacggagtgagcgatgttagcggcaatttcaatgcggataccgtcagcggtacgggcttgttgggtcagccagacacgctgttgctcacgcagggcgtcctgtacgcgggcttcttgctgataataacgagctacggcttcccctggctcaaccacaatcgccccggcgttgccgtcgatataaatcgtttgttgctgccacggagtaagggcatcaatatccacaccaaccagcgttggaatgttgaagctacgggcaaggatcaccgtatgactggtggtgccgccgcttttgagcaacaatcctttgaggtgatttttatccagttcgaggaactggctgggggtcagttcatcagccatacaaatggcgggctgcgtcagtttgcccggtgccgggaagcgttgctcaccgtagatttgctggagtaactggaagcagacgtcgcgtacgtccagggcacgttcttgcaggtagctgctgctggaacgggaaaactcttcgcaaaagtgattcgcgctggcaacaattgcttcggcgcagcttaatccggcgctgacgcctgccagtaaatgttcgcgcagggaagtatcgccagccagggatcggtgagcttccagaatcgcgctggtagcaccgtcgctatccagcagacgaaactcaatgtttttcagtaccagcgtcaggccgttttccagtgcggattgctcggcgtcaacgcctttggctgcgggaagattacccagcgcattgagatctaaagaagagatcggcgtcagaatgccgcctgcactaccgctgcacacggtgcgggcgcggataatttgcggattcagattggtcagactaaccggcagtggttccagttcgtcagatttaacttccgccagcggcgcatcgcagtgggggaattcatcgcgcagccattggcttaaacgctggtgcgcttcctgttcgtcggccccggaaatcagtaactggcagttatcgcccgccagcgtatcggtgccaatcagcgcaagggcgcttttggcgttgcccttgcggtcagtgcgcaggttatgccactcaatttgactactaaaagtattacacagcgtttcaacgtggcttgccggacgcgcatgtacgccgttaggtagctcacaaataaattccacaatcagggccattgcctctctcccggtacggttttctgtttacaggataagagcgcacggcaacggcctgccatgtgacaaatctgccaaaagctggacaaatgtaatgtaaccgtcaatttgcgacgcgtctcacaagacgctgttttgcggcatgcttccggtttatcgcaagttatgaggcggatcgcatttttgtactgatattacaaaagtccagtaaatggcctttttatccactgtttgctccgcctgcgattgcctattgtttcctccatcaaaaatatggacatgggctttcgcaagcccgggagcagcttatgaatgagttggtgcagatcctgaaaaatacccgtcagcatttaatgacgggcgttagtcacatgattcccttcgtggtaagcggcggtattttgctggcggtttccgtcatgttgtatggcaaaggcgcagtgccggatgccgtagccgatccaaatctgaaaaaactgtttgatatcggcgttgcgggcttgacgctgatggtgcctttcctcgcagcgtacatcggttattccattgcagagcgttctgcgctggctccgtgcgctatcggtgcctgggttggtaacagctttggtgcgggcttctttggtgcactgatcgccgggattatcggcggcatcgtggtgcattacctgaagaaaattccggtgcataaagttctgcgcagcgtgatgcctatcttcattattcctatcgtcggcacactgattaccgcaggcatcatgatgtggggcttgggcgagcctgtaggggcgttgaccaacagcctgactcagtggcttcaggggatgcagcagggcagcattgttatgctggcggtgatcatgggtctgatgctggcgttcgatatgggcggtccggttaacaaagtggcctatgccttcatgctgatttgcgttgctcagggtgtttataccgtggtggccatcgctgccgtgggtatttgtatcccgccgctggggatggggctggcgacgctgattggtcgtaaaaatttctccgcagaagagcgcgaaaccggcaaagcggcactggtgatgggctgtgttggcgttactgaaggggcgattcctttcgccgctgccgatccgctgcgtgtcattccttccatcatggtcggtagtgtttgtggtgcagtaactgcggcgctggtcggtgcgcagtgctatgcaggctggggtggtctgattgtgctgccggtggttgaaggcaagctgggttatatcgcagcagtggctgtcggagcagtggtgacggctgtttgtgtgaacgtgctgaaaagtctggcgcgtaaaaatgggtctagcactgatgaaaaagaagacgacctggatttggattttgaaattaattaattgaggaacgagccatgacgaaaattattgcagtaaccgcatgtcctagtggtgttgcccatacctatatggcagcagaggcgctggaaagtgccgcgaaagcgaaaggctgggaagtgaaagtagaaacccaggggagtattggtctggaaaatgaactgactgcggaagatgtggcgagcgctgatatggtgattctgaccaaagatatcggcatcaagtttgaagagcgttttgctggcaagaccatcgtgcgcgtcaacatcagcgatgcagtaaaacgtgctgacgccattatgagcaaaattgaagctcacctggcgcaaaccgcttaagttcttctcccgctcgcaagggcgggttcgctttcccacaggagttcctcatgacgaatcgtatctctcgcctcaaaactgcactgtttgccaatacccgtgaaatcagcctggagcgggcgctgctttataccgccagccatcggcaaaccgaaggcgaaccggtgatattgcgccgggcgaaagcaacagcgtatatccttgaacatgttgaaattagcattcgtgatgaagaactgattgccggtaaccgcaccgtaaaaccgcgcgccgggattatgagcccggaaatggacccttactggctgctgaaagagctggatcaattcccgacgcgtccgcaggaccgctttgctatcagcgaagaagataaacgtatctaccgtgaagagttgttcccgtactgggaaaaacgtagcatgaaagatttcatcaacgggcagatgacagatgaagtaaaagccgcgaccaacacgcagattttcagcatcaaccagacggataaaggccaggggcacattattattgattacccacgcctgttgaatcacgggctgggtgagctggtggcacagatgcagcaacattgtcagcaacagccggagaatcacttttatcaggccgcgttgttactgctggaagccagccagaaacacattttgcgttacgccgaactggcggaaacgatggcggcaaactgcacagatgcccagcgtcgcgaagagctgctgactattgcagagatctcccgccataacgcgcaacataagccgcagacgttctggcaggcgtgccagttattctggtacatgaacatcattctgcaatacgaatccaacgccagtagcctaagcttggggcgcttcgaccagtatatgttgccgttctatcagacaagtttaacccagggcgaagatgcggcgttcctgaaagaactgctcgaatctttatgggtgaaatgcaacgacatcgtgctgttgcgctccaccagtagcgcgcgttatttcgccggtttcccgaccggctataccgcactgctcggcgggttaaccgagaacggacgtagcgcggtgaacgtgcttagcttcctttgccttgacgcctatcaaagcgtgcaattaccgcaaccgaacctcggcgtgcgcactaacgccttgatcgacacgccgttcctgatgaaaaccgccgaaaccattcgcttcggtaccggtattccgcaaatctttaacgatgaagtggtggtgccagcgttcctcaaccgtggcgttagcctggaagatgcgcgcgactattccgtagtgggctgtgtggaattatctattcccggcagaacctacggcttgcatgacatcgcgatgtttaatctgctgaaagtgatggaaatctgcctgcatgaaaatgaaggcaatgctgcgctgacttatgaaggtttactggagcagatccgcgccaagatcagccactacatcaccctgatggttgagggcagcaatatttgtgatatcggccatcgcgactgggcacctgtaccgctgctcagtagctttatcagcgattgtctggaaaaaggccgcgatattaccgatggcggcgcgcgttataacttctccggcgtacaggggatcggtatcgccaacctgagcgattctctccatgcgttgaaagggatggtttttgagcaacagcgtttaagttttgacgaattgctgagcgtattaaaagccaacttcgcaacgccagaaggcgaaaaagtccgcgctcgcttaattaaccgcttcgagaaatacggtaacgatatcgacgaggtggataacatcagcgccgaactgttgcgccactactgcaaagaagtggaaaaataccagaacccgcgcggcggctacttcacgccgggaagctataccgtttctgctcacgtcccgttgggaagcgtggttggcgcgacgccagacggtcgttttgccggagaacagctggcagacggcggcttgagtcccatgctgggccaggacgcacaagggccaacagcggtactgaagagtgtcagtaagctcgataacacgctgctgtctaacggtacgttgctgaacgtgaaattcactccggcgaccctggaaggtgaagcaggattacgcaaactggccgacttcttacgggcgtttacccagcttaagttacaacatattcagtttaacgtggtgaacgccgacacgttgcgggaagcgcaacagcgcccacaagattatgccgggctggtggtgcgcgttgccggatacagcgccttctttgtcgaactgagcaaggagatccaggatgacatcatccgccggacagcgcatcagctgtaattaaactgtcgaaggagatccaggatgacaagttccgccggacagcgcatcagctgtaacgttgtggaaacgcgccgcgatgatgtggcgcgcattttcaacattcagcgttatagtctgaatgacggcgagggcattcgtacggtggtcttttttaaaggctgtccgcatctttgcccgtggtgtgctaatccggagagcatctccggcaaaatccagacggtacgcagagaggcgaaatgtctgcactgtgcgaaatgtttgcgtgatgcggatgaatgcccctccggggcgtttgaacggattggtcgcgatatcagccttgacgctctggaacgggaagtgatgaaagatgacattttctttcgcacgtccggcggcggcgtcacgctttctggcggcgaagtgttaatgcaggcggagtttgctacccgttttttacagcgactgcggctgtggggtgtgagttgcgccattgaaactgccggagacgcaccagccagcaagctattaccgctggcgaaattgtgcgatgaagtgttgttcgatttaaaaattatggacgcgactcaggcgcgggatgtggtgaagatgaacctgccacgcgtgctggagaatctgcgtttgctggtgagtgagggcgtcaacgtgatcccgcgtttaccgctgatccctggtttcacgctcagccgggagaatatgcagcaggcgctggatgtactgatcccgctgaatatcaggcagatccatctgttaccgtttcatcagtacggcgaaccgaaataccgcctgctggggaaaacatggagcatgaaagaggtgcctgcgccgagcagtgctgatgtggcaacgatgcgcgaaatggcagaacgggccggacttcaggttaccgtgggaggttaaaatggcatacctggtggcagtaaccgcctgcgtaagcggcgtggcgcatacttatatggcggcggaacggctggaaaagttgtgcctgttagagaagtggggagtcagcattgaaactcagggcgcgctgggaacggagaatcgtttagcggatgaggatatccgccgggcggatgttgctctgttgattacggatatcgagcttgccggtgccgagcgatttgaacattgccgctatgtgcaatgcagcatctacgcattcctgcgtgagccgcagcgggtaatgagcgcggtgcgcaaagtgctttctgcgccgcagcaaacccatcttattctggagtaattattctggagtagtcggtttttctgtcagttggctgtggtactgccggcgatattcgctcgggctgcgttcggtgtttttacgaaacagacggcagaagtagttgctgtcgacaaagccgcaggcgtgcgccacttcttttaccttcaggtcatagcctttcaataacgtcttagcgtgctccagtcgcgtgtgattcaggtattcgttaaaaccaatggcccccgttttttgaaacaggtggctgaggtaatttgggctaatataaaacgcctgtgcaacagattcgcgggtaagcgcggaggcatagcgttcgtcgatataatcgcgaatagcttcaaatagtgcctggctgcgactggcggtctggatttggctgccaagcaaatcgcggcagtggctaagcaggctggcgacgataagccttgccgtttgctgctcctgcggctgcatttgcatttcattgagcgtttgtagcagaaaagaacctatgcgtgggccgcgtcgggcgacgtgttgcttcgccagattttgatattgtttgccatcccattgcacgacgctgaagccgagttgctgtttgccaaacagcacgctaaaggtagtagcgggggcttgccattgtggaaaattccagccaccagcaggaacgtacagcacatcgccgggaactaacgttgctccagcgccggtatcaacaaactcaccttccagcacaatttccagccgtggaaaatcgacctgatacgcaagatcgggcaccgggccgttactgctggcaaagtaaatctggcgcagggacagcgggccgttgatcaggcgggagagcagatagctgacgtcgtgatacatgttattcccttaggtatgtagacgggaaaacagtaactggcattattaaaaaaggccacctgaaaagtgtggcctgaggggagttcgatgtaaacattgcggcagttgtattgccggatgtggcgtaaacgccttatccagcctaccgccgcgatctgtaggccggataagacgcgtcaagcgtcgcatccggcaaatagcgcctggctgataattactgattacccacctgatcgccatagggcagtgtgtcgtaatcgatcagtgcgtttttcttatacgggttaccaatccagcgggtagtttctttgaactgcggattcaccacactacgggttggatcgtaaccgtcgtaagataagcccgccaaatcactccaggtgtggatcagttccgccaggctgtatttacgatcaacatcctggctgaaatcacggggatgagtcgcttgccatttttcactcgtccacagcaggaacggaatggtgtacatatgacgcgtcgggttgtcctcattacgcccctgagttttgtgcggcggcgtgtcgtaaacctcttcaccgtggtcagagaaataaaccaggaaaccgttcgggtttgctgctttaaagtctttaatcaggctggcaaccacatgatcgttatacaggttagcgttgtcataatcgttataactctccagctcttccgcgtttaatcccggcggaacatgatcggtattgccatcaaacttgccctgattttccgggtagcggtatttgtatttgatatgcgtacccagcagatgaacaatgatcagtttcttcggcgcagggtcattcagcacttcctggaacggcttcagcacgttggtgtcgtattcacgcgcactctgcgtacgttgctggttcatgtagtactgcttgtcggtctggcggctaaataccgtcagcatggtattgcgggcggtcatcgtctgctggttggtgatccagaaggttttataacccgcctgtttcatcatgttcatcaggctcggctgcgtcagatacagatccgggttcttttcattggcaaaggtcagcgcctgttgcaggatttcaatggtgtacggacgagacgtaactacgttattaaacacggtcagattcggatcggttttatgcagcgcatccagctccggcgtggtttcacgcggataaccgtacagactcatgcgtccgcgctgggtgctctcgccaatcaccagcactaaagtgcgcggttcgttaccgctttcatctttgaaattagccagtggcggcaaggcattattttcattcagtaactttgttaggctgtttagttgctgacgatactgataatagccggtcaggaattgccacggtgcggcaggctccatacggctggccaggttatccaacgttttctcaaacggcttgtttttgataaacgtattcatggcgatcggatgcagaatcaagccataaagcagggcaaaagagacaacataacgccacggctttggaatatagaccgggcgcaggcgtgtccacagcagaactgccaccgccgtataggccagcgcgataagcacaattttcaggctgaaatactggcttaaatactcgctggcttcgttggtgttggtttcgaacatcacaaacagaacgctctggctgaactcctgaccgtagatgacgtagtagcacagcgccgccagagaggccgcccatagcaccacgccgattactgcggcaataattttaatccgcttcggaaagaggaataccgggatcaaccacaggctactgaataacaggctgtcgcgaatgccgttagtgccactataaccactgatgtaaataatggcctgtagcagagtagagaaaaaccaaaagtagagcagtgcccaacccagggctttccagctaaaaagaggtttagcctggacttctgtggaatgcatagtaagaacctgtcttgaaaaaatatcgccgaatgtaacgacaattccttaaggatatctgaaggtatattcagaatttgaataaaatgcagacagaaatatattgaaaacgagggtgttagaacagaagtatttcagaaaaccctcgcgcaaaagcacgagggtttgcagaagaggaagattagccggtattacgcatacctgccgcaatcccggcaatagtgaccattaacgcttgttcgacgcgaggatccggttcctggccttctttttctgcctggcgggagcggtgcagcaactcggcctgcaatacgttcagcgggtcggtgtaaatattccgtagctgaatagactctgcaatccacggcagatcggccatcagatgggaatcgttggcaatcgccagcaccactttgatgtcttcttcttgcaggttgcgtaactctttacctaacggccacagtgctttgtctaccaggcgttggtcatagtattccgccagccacaggtctgctttggcgaagaccatctccagcatgccgagacgcgtgctgaagaatggccaatcgcggcacatagcctccagctcgctctgtttgccgtcttcgaccactttttgcagcgccgtacctgcacccagccaggcggggagcatcagacggttttgcgtccaggcgaagatccacggaatggcgcgtagactctcgacgccgccggttgggcgacgtttcgccggacgactacccaacggcagtttgcccagttcttgttccggcgtagcggagcggaagtaaggcacaaaatctttgttttcacgtacgtagccgcggtagacatcgcaggagatgacactcagttcatccataatgcgacgccagctctctttcggctccggcggtggcagcaggttggcttccagaatcgccccggtataaaggctcaggctgctgacggtgatttctggcagaccatatttaaagcggatcatctcgccctgttcggttacgcgcaggccgcctttcaggcttcctggcggttgactcagcagcgccgcatgagcaggtgcgccgccgcgaccaatggaaccgccgcgaccgtggaacaacgtcagctcaatacccgctttttcgcaggttttgattaatgcatcctgtgcctgatattgcgcccaggaagctgccatcactcccgcatcttttgcactgtcggaatagccaatcatcaccatctgtttgccctgaatcaggccacgataccagtcaatattgagcagctgggtcatgacatcgttggcgttgttcagatcatcgagggtttcaaacagcggagcaaccggcatcgcaaacccgatacccgcttctttcagcagcaggtggacagccagtacgtcggacggcgttttcgccatgctgatcacgtaggcggcaatggagccttgcggtgcttcggcaatcacctggcaggtatcgagcacttcgcgcgtttcggcgcttggttgccagttgcgcggcagaagcggacgtttggagttcagttcgcggatcaggaacgcctgtttgtcggcctcactccagctttcgtagtcgccgataccgaggtagcgggtcagctcgcccagcgcttcggtatgacgcgtgctctcctgacggatatcaatacggaccagcggtacgccgaaacatttcacgcggcgcagggtgtcgagcagatcgccgttggcgataatacccatgccacacgcctgaagactctggtagcaagcgtagagcggttcccacagttcttcgttttgtgtcagcaggccttctggttttggcagttcttcgcctttcaggcgcgcttccagccatgcctgtgtcgccatcaggcgagaacgcaggtttttcatcagatagcgatacggttctgcggcaccttcttcgccaaccagcgccagcagttcaggggtcgcttcaaccatgctcagttcagaaaccagcacctgaatatctttcaggaacaaatcggtggctttccagcggctgagtagcaggacgtggcgggtgatatcggcagtgacgttcgggttgccgtcgcggtcgccgcccatccagctagtaaaacggaccggaacaaattcgacgggcagtttgtagccgaggttctcttccagttgttcgttcagttcgcgcaggtaatttggtacgccttgccacaggctgttttccactacggcaaagccccatttggcttcatctaccgggcttggacgcagcttacggatttcatcggtatgccaactctgggcgatcaactggcgcaggcgacgcatcagctggttgtgttcgtagtcagcgatatctttgttatcgagctgttttaaacaggcgttcacttccaccattttgtggatcagtgtacgacgggtaatttcggttgggtgagccgtgaggaccagttccaggctcaggctttccactgcttttttgatggtgtcttcgctcagttccggctggtttttcagtttacgcagggtgcgggcgatcacttccgggttgctggcagcttcgcctttcgggctaatgctgtggtattgctcggcggtgttggccaggttcaggaactgactaaacgcacgcgcaacgggcagcagctcgtcgttgctcaaattttgtaaggtggtgagcaactcctggcggttagcatcattgccagcgcgactagatttgctcaacttacggatagtttctacgcgttcaagaatgtgttctcccaacgcatccttgatggtttctcccagcactttgccgagcatactgacattactacgcaatgcggaatattgttcgttcatattaccccagacaccccatcttatcgtttgatagccctgtatccttcacgtcgcattggcgcgaatatgctcgggctttgcttttcgtcgtcttttataaagccacgtaaaagcggtgacgtcaaatgctgcgaaatcgcttcagcaaacgaataaatagcaggaatttacgtcattaaattcacgacgctttaaataagcgtaacttatggaaatgttaaaaaatcgccccaagtaacaccaaaggtgtaggtcggataagatgcgcaagtatcgcatccgacattattgcggcactggagtttggcaacagtgccggatgcggcgcgagcgccttatccggcctacagttgggcatcgtttgagtcactgtcggtcggataagatgcgcaagtatcgcatccgacattattgcggcactggagtttggcaacagtgccggatgcggcgcgagcgccttatccggcctacggttgggcatcgtttgagtcactgtaggtcggataagatgcgcaagcatcgcatccgacattattgcggcactggagtttggcaacagcgccggatgcggcgcgagcgccttatccggcctacgttttaatgccagcaaaaatggtgaattacctgggttatcagttcgcgggtgggcttgataaaccgtgtttccagatattcatcaggttgatgagcctgattaatactgccaggccccaacaccagcgtcgggcataacgtttgaataaacggcgcttcggtacagtagttcaccacttcggtttttgctccgagcaatttctcaaccacttcaaccagttgatgattcggtgggcattcatagccagggatcggcggatgcagctcgtcgaccgtcagacgacccggccagcgttcgctcaccggagccaatgcatcgttgagcaaaccattaagttcattgagtgtcatgccaggcagcggacgaatatccatatgcaactcacagcaagcgcaaatacggttagaagcgtcgccaccgtgaatatgcccgaggttgagcgtagggtatggcacggtaaacgcttcgtagtgataacgttctttcaggttatcgcgcaattgcaaaatatgcccgatggcgtcgtgcattagttcgatagcgttaactccgcgtgctggatcgctggagtgcccgctctggccctgaatacggatggcgttagagatatgacctttatgtgcgcgtaccggttgtagactcgtcggttcgccaatgatggcgcaatccgggcgcagggcggtagtttcggcaaaataacgcgctccggccatactggtttcttcatcagcagtcgccagaatgtagagcggttttttcagtttcgtgacgtcgacatcgcgtagcgcatcaaggataaacgcaaaaaagcctttcatgtcggcggtgcctaagccgtaaagcttgccgtcatgctccgtcagtgtaaacggatcgcgcgtccagcgaccgtcatcaaatggcaccgtatcggtatgccccgccagcaacaagccgccagccccctgtccgatacttgccagcatattgaatttgttgcgagttcctggaacaggctgcacttccacattgaagcccaaatctttaaaccagtccgccagcagagtgattaaatctgcattgctttgatcgagtgcctcttccgtggcgcttatactaggtgtggcaatcagagcgcggtaaatctcgataaatggcggtaatttgtttttcattgttgacacacctctggtcatgatagtatcaatattcatgcagtatttatgaataaaaatacactaacgttgagcgtaataaaacccaccagccgtaaggtgaatgttttacgtttaacctggcaaccagacataagaaggtgaatagccccgatgttgaatacgctgattgtgggtgccagcggctacgctggcgcagagctagtgacctatgtaaatcgccatccgcatatgaacataaccgctttgactgttagtgcgcaaagcaatgatgcgggaaagttaatctccgatttgcatccgcagctaaaaggcatcgttgatctgccgttgcagccgatgagcgatatcagcgagtttagcccaggggtggacgtagtgtttctcgccaccgcccatgaagttagccacgatttagcgccgcagtttcttgaagcgggctgcgtggtgttcgacctttccggcgcgtttcgtgttaacgacgccaccttctatgaaaaatattacggctttacccatcaatacccggaactgttggaacaggcagcctacggtctggcggagtggtgcggtaataaattaaaagaagcgaatttgattgcggtgccgggctgttatccgacggcggcacagctggcgctgaaaccgttgattgatgccgatcttcttgacctcaatcagtggccggtgatcaacgccaccagcggcgtgagcggtgcagggcgtaaagcggccattagtaacagcttttgtgaagttagcctgcaaccgtatggcgtctttactcatcgccatcaaccagagatcgccacacacctcggtgctgacgttatcttcaccccacatctgggcaatttcccgcgcggcattctcgaaaccattacctgccgcctgaaaagcggtgtgacccaggcgcaagtcgcgcaagtgttacagcaggcgtatgcccataaaccgctggtgcggctgtatgacaaaggcgttccggcgctgaaaaatgtcgttgggctgccattttgcgatatcgggtttgccgttcagggcgagcatctgattattgtggcgaccgaagacaacttactgaaaggcgcggcggcacaagcggtacagtgcgccaatattcgtttcggctatgcggaaacgcagtctcttatttaagggtgcaatgatgaatccattaattatcaaactgggcggcgtactgctggatagtgaagaggcgctggaacgtctgtttagcgcactggtgaattatcgtgagagtcatcagcgtccgctggtgattgtgcacggcggcggttgcgtggtggatgagctgatgaaagggctgaatctgccggtgaaaaagaaaaacggcctgcgggtgacgcctgctgatcagatagacattatcaccggagcactggcgggaacggcaaataaaaccctgttggcatgggcgaagaaacatcagattgcggccgtaggtttgtttctcggtgacggcgacagcgtcaaagtgacccagcttgatgaagagttaggtcatgttggactggcgcagccaggtagccctaagcttatcaactccttgctggagaacggttatctgccggtggtcagctccattggcgtaacagacgaagggcaactgatgaacgtcaatgccgaccaggcggcaacggcgctggcggcaacgctgggcgcggatctgattttgctctccgacgtcagcggcattctcgacggcaaagggcaacgcattgccgaaatgaccgccgcgaaagcagaacaactgattgagcagggcattattactgacggcatgatagtgaaagtgaacgcggcgctggatgcggcccgcacgctgggccgtccggtagatatcgcctcctggcgtcatgcggagcagcttccggcactgtttaacggtatgccgatgggtacgcggattttagcttaagttttgttggccggaggcgcagctttccggcattgaatttcaaaataaggaaacagagttatggcactttggggcgggcgttttacccaggcagcagatcaacggttcaaacaattcaacgacagtctgcgctttgattaccgtctggcggagcaggatattgttggctctgtggcctggtccaaagccctggtcacggtaggcgtgttaaccgcagaagagcaggcgcaactggaagaggcgctgaacgtgttgctggaagatgttcgcgccaggccacaacaaatccttgaaagcgacgccgaagatatccatagctgggtggaaggcaaactgatcgacaaagtgggccagttaggcaaaaagctgcataccgggcgtagccgtaatgatcaggtagcgactgacctgaaactgtggtgcaaagataccgttagcgagttactgacggctaaccggcagctgcaaagcgcgctggtggaaaccgcacaaaacaatcaggacgcggtaatgccaggttacactcacctgcaacgcgcccagccggtgacgttcgcgcactggtgcctggcctatgttgagatgctggcgcgtgatgaaagccgtttgcaggatgcgcttaagcgtctggatgtcagcccgctaggctgtggcgcgctggcgggaacggcctatgaaatcgaccgtgaacagttagcaggctggctgggctttgctagcgcgacccgtaacagtctcgacagcgtttctgaccgtgaccatgtgttggaactgctttctgctgccgctatcggcatggtgcatctgagccgttttgctgaagatctgattttctttaacaccggcgaagcggggtttgtggagctttctgaccgcgtgacttccggtagtagtttaatgccgcagaagaaaaacccggatgcgctggagctgattcgcggtaaatgcggccgggtgcagggggcgttaaccggcatgatgatgacgctgaaaggtttgccgctggcttacaacaaagatatgcaggaagacaaagaaggtctgttcgacgcgctcgatacctggctggactgcctgcatatggcggcgctggtgctggacggcattcaggtgaaacgtccacgttgccaggaagcggctcagcagggttacgccaacgccaccgaactggcggattatctggtggcgaaaggcgtaccgttccgcgaggcgcaccatattgttggtgaagcggtggtggaagccattcgtcagggcaaaccgctggaagatctgccgctcagtgagttgcagaaattcagtcaggtgattgacgaagatgtctatccgattctgagcctgcaaagctgcctcgacaagcgtgcggcaaaaggcggcgtcagtccgcagcaggtggcgcaggcgattgcttttgcgcaggctcggttagggtaagaacatttatatgtataaatttgagcctggcttatcgccgggcttttttatggcaaaaaaaagcggatcctggagatccgcaaaagttcacgttggctttagttattcgagttgagaaactctcgaaacgggcagtgacttcaagggttaaaagaggtgccgctccgtttctgtgagcaattatcagtcagaatgcttgatagggataatcgttcattgctattctacctatcgccatgaactatcgtggcgatggaggatggataatgaatattcgtgatcttgagtacctggtggcattggctgaacaccgccattttcggcgtgcggcagattcctgccacgttagccagccgacgcttagcgggcaaattcgtaagctggaagatgagctgggcgtgatgttgctggagcggaccagccgtaaagtgttgttcacccaggcgggaatgctgctggtggatcaggcgcgtaccgtgctgcgtgaggtgaaagtccttaaagagatggcaagccagcagggcgagacgatgtccggaccgctgcacattggtttgattcccacagttggaccgtacctgctaccgcatattatccctatgctgcaccagacctttccaaagctggaaatgtatctgcatgaagcacagacccaccagttactggcgcaactggacagcggcaaactcgattgcgtgatcctcgcgctggtgaaagagagcgaagcattcattgaagtgccgttgtttgatgagccaatgttgctggctatctatgaagatcacccgtgggcgaaccgcgaatgcgtaccgatggccgatctggcaggggaaaaactgctgatgctggaagatggtcactgtttgcgcgatcaggcaatgggtttctgttttgaagccggggcggatgaagatacacacttccgcgcgaccagcctggaaactctgcgcaacatggtggcggcaggtagcgggatcactttactgccagcgctggctgtgccgccggagcgcaaacgcgatggggttgtttatctgccgtgcattaagccggaaccacgccgcactattggcctggtttatcgtcctggcagtccgctgcgcagccgctatgagcagctggcagaggccatccgcgcaagaatggatggccatttcgataaagttttaaaacaggcggtttaaaccgtttaacgcagctacccgataggcttccgccatcgtcgggtagttaaaggtggtgttgacgaagtactcaatagtgttgccgccacctttctgttccataatcgcctgaccgatatgaataatttcggcagcgcgctcgccaaagcagtgaatacccagaatctcttttgtttcccgatggaacaaaattttcagcgtgcccacgttcatgccgacgatttgtgcgcgtgccagatgtttaaactgggcgcggcccacttcatatggcactttcattgcggtcagctgctgttcggttttgcccacagagctgatttccgggatggtgtaaataccggtagggatatcttcaatcagatgtgcggtggcttcgccttttaccagcgcctgcgcggcaatgcgcccctggtcataggccgcgctcgccaggctcggataaccaatcacgtcgcccaccgcgtaaacgtgtggctgtgcggtctgatacatgctgttgaccttcagctgtccgcggctgtcagtttctagcccaatgttctgtaacgccaggctatcggtattaccggtgcgaccgttggcatagagcaggcagtcagctttcagttttttaccgctcttcagatgcatgatcacaccatcgtcacagccttcgatcttctcgtactcttcgttgtgacgaatcactacgccactgttccagaagtgataggagagagaatcactcatctcttgatcgagaaatgccagcaggcgatcgcgggtgttgatcagatccacttttacatccataccgcggaagatgctcgcatattcacagccgatcactccagcaccatagataagtacatggcgcggttcgtggtgcatgctgagaatactgtcgctgtcgtaaatgcgtggatgggtgaaatcaacatctgttggatgatatggacgagagccgcaggcaataacaaatttttcagcggttagtgtttcaacgctgccgtccgggcaatccagcgccaacgtatgctcgtcaacaaagcgagcgtttccctgcaatatttcacagtgattacgttcgtaaaatccctgacgcatgcgcgtttgttgattaatcacgttatcggcatggttaaggatatcggcaaaagaagagcggagcagtcgggaatggtcgctgtaaagtgggttttgattgaattctataatgcggctgacggcgtgacggagagctttgctcgggatggtgccccagtgggtgcaaccgccgccaacattttgataacgctcgataactgcgacgcgcgcaccttgcttaaccaggcccattgcagcgccttcgccgccggggccggaacctattactatggcatcgtaatcgtaggaatgtggcatggtagggcttacctgttcttatacataaaagcaacagaatggtaacattttatcgcgggtaagccaattgatccccgtcatttatctggctatatcctgagcggcctttgctttgtctgtttcttacttttgccctgacgttttattggatttttatcgacgatactctccgtttaagcggcaggtttccgctgtacgtaaaagaaccggccaaagaattgcagtaaatatgttttattgcgttaccgttcattcacaatactggagcaatccagtatgttcattctctggtatagtgccagcagtacttttggcaaggatagtgacatcgtgatgggcgtaagagcgcaacaaaaagaaaaaacccgccgtagcctggtggaagccgcatttagccaattaagtgctgaacgcagcttcgccagcctgagtttgcgtgaagtggcgcgtgaagcgggcattgctcccacctctttttatcggcatttccgcgacgtagacgaactgggtctgaccatggttgatgagagcggtttaatgctacgccaactcatgcgccaggcgcgtcagcgtatcgccaaaggcgggagtgtgatccgcaccagcgtctccacatttatggagttcatcggtaataatcctaacgccttccggttattattgcgggaacgctccggcacctccgctgcgtttcgtgccgccgttgcgcgtgaaattcagcacttcattgcggaacttgcggactatctggaactcgaaaaccatatgccgcgtgcgtttactgaagcgcaagccgaagcaatggtgacaattgtcttcagtgcgggtgccgaggcgttggacgtcggcgtcgaacaacgtcggcaattagaagagcgactggtactgcaactgcgaatgattagcaaaggggcttattactggtatcgccgtgaacaagagaaaaccgcaattattccgggaaatgtgaaggacgagtaatgaaacaagcaaatcaagatagaggtacgctgctgctggcgttagttgctggcttaagcattaatggtactttcgcagcgctgtttagctccattgtgccattttctgtattcccgattatttccctggtgctgacggtttactgcctgcatcaacgttatcttaatcgcactatgccggtaggcttgccgggtctggcagctgcctgttttattctcggcgtactgctgtacagcacggtagttcgtgcggaatatccggatatcggctctaacttcttcccggcagtactctccgtcattatggtgttctggattggcgcgaagatgcgtaaccgtaagcaggaagttgctgagtaatcggtattatgccggatgctggcgcatccggcatgggttttacttcgcggtcagtaatacgccgcactccatatggtgcgtgtaggggaactgatcaaacagagccagacgttcgaccttgtgcgtctggcttaatgtttccagattcttgcataacgtttccgggttacaggagatgtacaaaatacgcggatacgcctgcaccattttctcggtttcactgtccagaccgctgcgcggagggtcgacaaaaatggtttcgcactgataactctttaagtcgatcccttgcaggcggttaaactcgcgcacaccattcatcgcctgagtaaattcttctgccgccatacgaataatttgtacgttatcaatatggttagctgcgatgttgtattgcgcagcagcaacgctcggcttagcgatttcggtggctaatacccgatcaaaattacgcgccagcgctaaactaaagttaccgttgccgcagtacagctccagtaaatcgcctttactgcctttggttacgtccagcgcccattccagcatctgaatattcatcgccgcgttcggctgggtaaagctgttttctacctgacggtagatcatctctttccctgcgaccggcagacgttcatcgatgtaatcctgatccagctcgattttggttttcgttgcccgaccaatcagatgcacattcagattctgcgcgcgcagtgcatcgcgcagggcctccgcttcctgacgccactcatcatccagcttcttatggtatagcagggaaaccaccgcctgattactcagtgtagtgaggtaatcaatctggaacaacttgtggcgcagaacgggattattacgcacacccgcaatcatcgccgtcatcaactggttgataagttcactggcggcggggaagctatccacgcggatgcggcttttggtttgttgatcgaaaatgatgtgatacaggtcatcgccatcgtgccagatgcggaactccgcgcgcatccggtaatgactgaccgggctgcgaaacacttccggaaccaggtcagaaaacggtgccatcatactttgcaaacgtaccactttttcggctaactgcgcttcatactgttctgttggaaggtgttcgggggtcatgatgtatcctgaaaaattaaagtacgcggcgattgtagggattgctcatcagatgtccagatcttgatgaattcctatttgtgagctacgtctggacagtaacttgttacaacctgtagcatccacttgccggtcctgtgagttaatagggaatccagtgcgaatctggagctgacgcgcagcggtaaggaaaggtgcgatgattgcgttatgcggacactgccattcggtgggaagtcatcatctcttagtatcttagatacccctccaagcccgaagacctgccggccaacgtcgcatctggttctcatcatcgcgtaatattgatgaaacctgcggcatccttcttctattgtggatgctttacaatgattaaaaaagctagcctgctgacggcgtgttccgtcacggcattttccgcttgggcacaggataccagcccggatactctcgtcgttactgctaaccgttttgaacagccgcgcagcactgtgcttgcaccaaccaccgttgtgacccgtcaggatatcgaccgctggcagagcaccagcgtcaatgatgtgctgcgccgtcttccgggcgtcgatatcacccaaaacggcggtagtggtcagctcagttctatttttattcgcggtacaaatgccagtcatgtgttggtgttaattgatggcgtacgcctgaatctggcgggggtgagtggttctgccgaccttagccagttccctattgcgcttgtccagcgtgttgaatatatccgtgggccgcgctccgctgtttatggttccgatgcaataggcggggtggtgaatatcatcacgacgcgcgatgaacccggaacggaaattagtgcagggtggggaagcaatagttatcagaactatgatgtctctacgcagcaacaactgggggataagacacgggtaacgctgttgggcgattatgcccatactcatggttatgatgttgttgcctatggtaataccggaacgcaagcgcagacagataacgatggttttttaagtaaaacgctttatggcgcgctggagcataactttactgatgcctggagcggctttgtgcgcggctatggctatgataaccgtaccaattatgacgcgtattattctcccggtagtccgttgctcgatacccgtaaactctatagccaaagttgggacgccgggctgcgctataacggcgaactgattaaaagtcaactcattaccagctatagccatagcaaagattacaactacgatccccattatggtcgttatgatagcagcgcgacgctcgatgagatgaagcaatacaccgtccagtgggcaaacaatgtcatcgttggtcacggtagtattggtgcgggtgtcgactggcagaaacagactacgacgccgggtacaggttatgttgaggatggatatgatcaacgtaataccggcatctatctgaccgggctgcaacaagtcggcgattttacctttgaaggcgcagcacgcagtgacgataacagtcagtttggtcgtcatggaacctggcaaaccagcgccggttgggaattcatcgaaggttatcgcttcattgcttcctacgggacatcttataaggcaccaaatctggggcaactgtatggcttctacggaaatccgaatctggacccggagaaaagcaaacagtgggaaggcgcgtttgaaggcttaaccgctggggtgaactggcgtatttccggatatcgtaacgatgtcagtgacttgatcgattatgatgatcacaccctgaaatattacaacgaagggaaagcgcggattaagggcgtcgaggcgaccgccaattttgataccggaccactgacgcatactgtgagttatgattatgtcgatgcgcgcaatgcgattaccgacacgccgttgttacgccgtgctaaacagcaggtgaaataccagctcgactggcagttgtatgacttcgactggggtattacttatcagtatttaggcactcgctatgataaggattacagttcttatccttatcaaaccgttaaaatgggcggtgtgagcttgtgggatcttgcggttgcgtatccggtcacctctcacctgacagttcgtggtaaaatagccaacctgttcgacaaagattatgagacagtctatggctaccaaactgcaggacgggaatacaccttgtctggcagctacaccttctgaaccacgtcccaccgtgctggtgtttgactccggcgtcggtgggttgagcgtctatgacgagatccggcatctcttaccggatctccattacatttatgctttcgataacgtcgctttcccgtatggcgaaaaaagcgaagcgtttattgttgagcgagtggtggcaattgtcaccgcggtgcaagaacgttatccccttgcgctggctgtggtcgcttgcaacactgccagtaccgttagtcttcctgcattacgcgaaaagttcgacttcccggttgttggtgtcgtgccggcgattaaacctgctgcacgtctgacggcaaatggcattgtcggattactggcaacccgcggaacagttaaacgttcttatactcatgagctgatcgcgcgtttcgctaatgaatgccagatagaaatgctgggcagcgcagagatggttgagttggctgaagcgaagctacatggcgaagatgtttctctggatgcactaaaacgtatcctacgcccgtggttaagaatgaaagagccgccagataccgttgtattgggttgcacccatttccctctactacaagaagaactgttacaagtgctgccagagggaacccggctggtggattctggcgcagcgattgctcgccgaacggcctggttgttagaacatgaagccccggatgcaaaatctgccgatgcgaatattgccttttgtatggcaatgacgccaggagctgaacaattattgcccgttttacagcgttacggcttcgaaacgctcgaaaaactggcagttttaggctgatttggttgaatgttgcgcggtcagaaaattattttaaatttcctcttgtcaggccggaataactccccataatgcgccaccactgacacggaacaacggcaaacacgccgccgggtcagcggggttctcctgagaactccggcagagaaagcaaaaataaatgcttgactctgtagcgggaaggcgtattatgcacaccccgcgccgctgagaaaaagcgaagcggcactgctctttaacaatttatcagacaatctgtgtgggcactcgaagatacggattcttaacgtcgcaagacgaaaaatgaataccaagtctcaagagtgaacacgtaattcattacgaagtttaattctttgagcgtcaaacttttaaattgaagagtttgatcatggctcagattgaacgctggcggcaggcctaacacatgcaagtcgaacggtaacaggaagaagcttgcttctttgctgacgagtggcggacgggtgagtaatgtctgggaaactgcctgatggagggggataactactggaaacggtagctaataccgcataacgtcgcaagaccaaagagggggaccttcgggcctcttgccatcggatgtgcccagatgggattagctagtaggtggggtaacggctcacctaggcgacgatccctagctggtctgagaggatgaccagccacactggaactgagacacggtccagactcctacgggaggcagcagtggggaatattgcacaatgggcgcaagcctgatgcagccatgccgcgtgtatgaagaaggccttcgggttgtaaagtactttcagcggggaggaagggagtaaagttaatacctttgctcattgacgttacccgcagaagaagcaccggctaactccgtgccagcagccgcggtaatacggagggtgcaagcgttaatcggaattactgggcgtaaagcgcacgcaggcggtttgttaagtcagatgtgaaatccccgggctcaacctgggaactgcatctgatactggcaagcttgagtctcgtagaggggggtagaattccaggtgtagcggtgaaatgcgtagagatctggaggaataccggtggcgaaggcggccccctggacgaagactgacgctcaggtgcgaaagcgtggggagcaaacaggattagataccctggtagtccacgccgtaaacgatgtcgacttggaggttgtgcccttgaggcgtggcttccggagctaacgcgttaagtcgaccgcctggggagtacggccgcaaggttaaaactcaaatgaattgacgggggcccgcacaagcggtggagcatgtggtttaattcgatgcaacgcgaagaaccttacctggtcttgacatccacggaagttttcagagatgagaatgtgccttcgggaaccgtgagacaggtgctgcatggctgtcgtcagctcgtgttgtgaaatgttgggttaagtcccgcaacgagcgcaacccttatcctttgttgccagcggtccggccgggaactcaaaggagactgccagtgataaactggaggaaggtggggatgacgtcaagtcatcatggcccttacgaccagggctacacacgtgctacaatggcgcatacaaagagaagcgacctcgcgagagcaagcggacctcataaagtgcgtcgtagtccggattggagtctgcaactcgactccatgaagtcggaatcgctagtaatcgtggatcagaatgccacggtgaatacgttcccgggccttgtacacaccgcccgtcacaccatgggagtgggttgcaaaagaagtaggtagcttaaccttcgggagggcgcttaccactttgtgattcatgactggggtgaagtcgtaacaaggtaaccgtaggggaacctgcggttggatcacctccttaccttaaagaagcgtactttgtagtgctcacacagattgtctgatagaaagtgaaaagcaaggcgtttacgcgttgggagtgaggctgaagagaataaggccgttcgctttctattaatgaaagctcaccctacacgaaaatatcacgcaacgcgtgataagcaattttcgtgtccccttcgtctagaggcccaggacaccgccctttcacggcggtaacaggggttcgaatcccctaggggacgccacttgctggtttgtgagtgaaagtcgccgaccttaatatctcaaaactcatcttcgggtgatgtttgagatatttgctctttaaaaatctggatcaagctgaaaattgaaacactgaacaacgagagttgttcgtgagtctctcaaattttcgcaacacgatgatgaatcgaaagaaacatcttcgggttgtgaggttaagcgactaagcgtacacggtggatgccctggcagtcagaggcgatgaaggacgtgctaatctgcgataagcgtcggtaaggtgatatgaaccgttataaccggcgatttccgaatggggaaacccagtgtgtttcgacacactatcattaactgaatccataggttaatgaggcgaaccgggggaactgaaacatctaagtaccccgaggaaaagaaatcaaccgagattcccccagtagcggcgagcgaacggggagcagcccagagcctgaatcagtgtgtgtgttagtggaagcgtctggaaaggcgcgcgatacagggtgacagccccgtacacaaaaatgcacatgctgtgagctcgatgagtagggcgggacacgtggtatcctgtctgaatatggggggaccatcctccaaggctaaatactcctgactgaccgatagtgaaccagtaccgtgagggaaaggcgaaaagaaccccggcgaggggagtgaaaaagaacctgaaaccgtgtacgtacaagcagtgggagcacgcttaggcgtgtgactgcgtaccttttgtataatgggtcagcgacttatattctgtagcaaggttaaccgaataggggagccgaagggaaaccgagtcttaactgggcgttaagttgcagggtatagacccgaaacccggtgatctagccatgggcaggttgaaggttgggtaacactaactggaggaccgaaccgactaatgttgaaaaattagcggatgacttgtggctgggggtgaaaggccaatcaaaccgggagatagctggttctccccgaaagctatttaggtagcgcctcgtgaattcatctccgggggtagagcactgtttcggcaagggggtcatcccgacttaccaacccgatgcaaactgcgaataccggagaatgttatcacgggagacacacggcgggtgctaacgtccgtcgtgaagagggaaacaacccagaccgccagctaaggtcccaaagtcatggttaagtgggaaacgatgtgggaaggcccagacagccaggatgttggcttagaagcagccatcatttaaagaaagcgtaatagctcactggtcgagtcggcctgcgcggaagatgtaacggggctaaaccatgcaccgaagctgcggcagcgacgcttatgcgttgttgggtaggggagcgttctgtaagcctgcgaaggtgtgctgtgaggcatgctggaggtatcagaagtgcgaatgctgacataagtaacgataaagcgggtgaaaagcccgctcgccggaagaccaagggttcctgtccaacgttaatcggggcagggtgagtcgacccctaaggcgaggccgaaaggcgtagtcgatgggaaacaggttaatattcctgtacttggtgttactgcgaaggggggacggagaaggctatgttggccgggcgacggttgtcccggtttaagcgtgtaggctggttttccaggcaaatccggaaaatcaaggctgaggcgtgatgacgaggcactacggtgctgaagcaacaaatgccctgcttccaggaaaagcctctaagcatcaggtaacatcaaatcgtaccccaaaccgacacaggtggtcaggtagagaataccaaggcgcttgagagaactcgggtgaaggaactaggcaaaatggtgccgtaacttcgggagaaggcacgctgatatgtaggtgaggtccctcgcggatggagctgaaatcagtcgaagataccagctggctgcaactgtttattaaaaacacagcactgtgcaaacacgaaagtggacgtatacggtgtgacgcctgcccggtgccggaaggttaattgatggggttagcgcaagcgaagctcttgatcgaagccccggtaaacggcggccgtaactataacggtcctaaggtagcgaaattccttgtcgggtaagttccgacctgcacgaatggcgtaatgatggccaggctgtctccacccgagactcagtgaaattgaactcgctgtgaagatgcagtgtacccgcggcaagacggaaagaccccgtgaacctttactatagcttgacactgaacattgagccttgatgtgtaggataggtgggaggctttgaagtgtggacgccagtctgcatggagccgaccttgaaataccaccctttaatgtttgatgttctaacgttgacccgtaatccgggttgcggacagtgtctggtgggtagtttgactggggcggtctcctcctaaagagtaacggaggagcacgaaggttggctaatcctggtcggacatcaggaggttagtgcaatggcataagccagcttgactgcgagcgtgacggcgcgagcaggtgcgaaagcaggtcatagtgatccggtggttctgaatggaagggccatcgctcaacggataaaaggtactccggggataacaggctgataccgcccaagagttcatatcgacggcggtgtttggcacctcgatgtcggctcatcacatcctggggctgaagtaggtcccaagggtatggctgttcgccatttaaagtggtacgcgagctgggtttagaacgtcgtgagacagttcggtccctatctgccgtgggcgctggagaactgaggggggctgctcctagtacgagaggaccggagtggacgcatcactggtgttcgggttgtcatgccaatggcactgcccggtagctaaatgcggaagagataagtgctgaaagcatctaagcacgaaacttgccccgagatgagttctccctgaccctttaagggtcctgaaggaacgttgaagacgacgacgttgataggccgggtgtgtaagcgcagcgatgcgttgagctaaccggtactaatgaaccgtgaggcttaaccttacaacgccgaagctgttttggcggatgagagaagattttcagcctgatacagattaaatcagaacgcagaagcggtctgataaaacagaatttgcctggcggcagtagcgcggtggtcccacctgaccccatgccgaactcagaagtgaaacgccgtagcgccgatggtagtgtggggtctccccatgcgagagtagggaactgccaggcatcaaataaaacgaaaggctcagtcgaaagactgggcctttcgttttatctgttgtttgtcggtgaacgctctcctgagtaggacaaatccgccgggagcggatttgaacgttgcgaagcaacggcccggagggtggcgggcaggacgcccgccataaactgccaggcatcaaattaagcagaaggccatcctgacggatggcctttttgcgtttctacaaactcttcctgtcgtcatatctacaagccatccccccacagatacggtaaactagcctcgtttttgcatcaggaaagcagctatgaaccactccttaaaaccctggaacacatttggcattgatcataatgctcagcacattgtatgtgccgaagacgaacaacaattactcaatgcctggcagtatgcaaccgcagaaggacaacccgttcttattctgggtgaaggaagtaatgtactttttctggaggactatcgcggcacggtgatcatcaaccggatcaaaggtatcgaaattcatgatgaacctgatgcgtggtatttacatgtaggagccggagaaaactggcatcgtctggtaaaatacactttgcaggaaggtatgcctggtctggaaaatctggcattaattcctggttgtgtcggcagtagtcctatccagaatattggtgcttatggcgtagaattacagcgagtttgcgcttatgttgattctgttgaactggcgacaggcaagcaagtgcgcttaactgccaaagagtgccgttttggctatcgcgacagtatttttaaacatgaataccaggaccgcttcgctattgtagccgtaggtctgcgtctgccaaaagagtggcaacctgtactaacgtatggtgacttaactcgtctggatcctacaacagtaacgccacagcaagtatttaatgcggtgtgtcatatgcgcaccaccaaactccctgatccaaaagtgaatggcaatgccggtagtttcttcaaaaaccctgttgtatctgccgaaacggctaaagcattactgagtcaatttccaacagcaccaaattacccccaggcggatggtagtgtaaaactggcagcaggttggcttatcgatcagtgccagctaaaagggatgcaaataggtggggctgcggtgcaccgtcaacaggcgttagttctcattaatgaagacaatgcaaaaagcgaagatgttgtacagctggcgcatcatgtaagacagaaagttggtgaaaaatttaatgtctggcttgagcctgaagtccgctttattggtgcaagtggtgaagtgagcgcagtggagacaattagttgaaataaagcgcagtggagacaatttcatgaaggataacaccgtgccactgaaattgattgccctgttagcgaacggtgaatttcactctggcgagcagttgggtgaaacgctgggaatgagccgggcggctattaataaacacattcagacactgcgtgactggggcgttgatgtctttaccgttccgggtaaaggatacagcctgcctgagcctatccagttacttaatgctaaacagatattgggtcagctggatggcggtagtgtagccgtgctgccagtgattgactccacgaatcagtaccttcttgatcgtatcggagagcttaaaagcggcgatgcttgcattgcagaataccagcaggctggccgtggtcgccggggtcggaaatggtttagcccttttggcgcaaacttatatttgagcatgttctggcgtctggaacaaggcccggcggcggcgattggtttaagtctggttatcggtatcgtgatggcggaagtattacgcaagctgggtgcagataaagttcgtgttaaatggcctaatgacctctatctgcaggatcgcaagctggcaggcattctggtggagctgactggcaaaactggcgatgcggcgcaaatagtcattggagccgggatcaacatggcaatgcgccgtgttgaagagagtgtcgttaatcaggggtggatcacgctgcaggaagcggggatcaatctcgatcgtaatacgttggcggccatgctaatacgtgaattacgtgctgcgttggaactcttcgaacaagaaggattggcaccttatctgagccgctgggaaaagctggataattttattaatcgcccagtgaaacttatcattggtgataaagaaatatttggcattagtcgcggaatagacaaacagggggctttattacttgagcaggatggaataataaaaccctggatgggcggtgaaatatccctgcgtagtgcagaaaaataagaaaggggagtattcgctcccctgcaaattatttgcgtagtctgacctcttctaccgcatgattagcacttttcgtcaggattaaactggcgcgctcacgagtaggtagaatattttgctttaagttcagccagttgatctctttccacaatgtcatggcagtcttaatcgcttcttctttagttaatttcgcgtagttatgaaaataggaatccgggtcggtaaaagccccttcgcggaatttcagaaaacggttgatataccatgtctgaagtaagtcttccggtgcatcaacatatatgctaaaatcgacaaaatcagaaacaaatacatgatgtggatcgtgtggataatccatcccgctctgtaagacatttaacccttcaagaattaaaatatcaggctgaacaaccgttttatctccatccgggatcacatcataaataagatgactgtaaacaggtgctgtaacgtttggcacgccggatttgagatcggaaacaaacttcaccaggcgatgcatatcatagctttccgggaagcctttcttcttcatcagaccacgttctttcagaacctgattagggtgaaggaagccatctgtagtgatcagttcaacacgacgatgttccggccaacggcttaatagcgcctgcaatacacgggcggttgtacttttccccaccgcgacactgccagcaatactgataatgtaaggaatgcgttgcccgttggtaccaagaaactgttccagaactgcctgacggcgcagattgctgcttatatagaagttcagcaaacgactcaaaggtaaatagatctcggcaacttcttctaagctgagatcttcattaatacctttgagacgggcgatctcatcttcgcttaacgtcataggtacggaatcacgcagagctgcccactggttgcggtcaaactgtaggtaaggcgtcattaacgtttgctcttttatactcataagcatgtttctggcggtcatagctctatcggcaaagcgatatttgccatggcgcgtcacagttctgttgaatgggttaatgggcaggagggtaacaccagatggggaggaataataagaaaaaatctctgccaggaagctatcgttgaaaagcaatgtgacagatattccatctgataaaaagaattatggtttagcaggagcgcattgttgagcacaatgatgttgaaaaagtgtgctaatctgccctccgttcggctgtttcttcatcgtgtcgcataaaatgtgaccaataaaacaaattatgcaattttttagttgcatgaactcgcatgtctccatagaatgcgcgctacttgatgccgacttagctcagtaggtagagcaactgacttgtaatcagtaggtcaccagttcgattccggtagtcggcaccatcaagtccggtggggttcccgagcggccaaagggagcagactgtaaatctgccgtcacagacttcgaaggttcgaatccttcccccaccaccaatttcggccacgcgatggcgtagcccgagacgataagttcgcttaccggctcgaataaagagagcttctctcgatattcagtgcagaatgaaaatcaggtagccgagttccaggatgcgggcatcgtataatggctattacctcagccttccaagctgatgatgcgggttcgattcccgctgcccgctccaagatgtgctgatatagctcagttggtagagcgcacccttggtaagggtgaggtcggcagttcgaatctgcctatcagcaccacttcttttctcctccctgttttttccttctgtttattgcattcaacaagtcgggcatgttgcctggttgatgtggtgatatcaccgatttatccgtgtcttagagggacaatcgatgtctaaagaaaagtttgaacgtacaaaaccgcacgttaacgtcggtactatcggccacgttgaccatggtaaaacaacgctgaccgctgcaatcactaccgtactggctaaaacctacggcggtgctgctcgcgcattcgaccagatcgataacgcgccggaagaaaaagctcgtggtatcaccatcaacacttctcacgttgaatacgacaccccgacccgccactacgcacacgtagactgcccggggcacgccgactatgttaaaaacatgatcaccggtgctgcgcagatggacggcgcgatcctggtagttgctgcgactgacggcccgatgccgcagactcgtgagcacatcctgctgggtcgtcaggtaggcgttccgtacatcatcgtgttcctgaacaaatgcgacatggttgatgacgaagagctgctggaactggttgaaatggaagttcgtgaacttctgtctcagtacgacttcccgggcgacgacactccgatcgttcgtggttctgctctgaaagcgctggaaggcgacgcagagtgggaagcgaaaatcctggaactggctggcttcctggattcttacattccggaaccagagcgtgcgattgacaagccgttcctgctgccgatcgaagacgtattctccatctccggtcgtggtaccgttgttaccggtcgtgtagaacgcggtatcatcaaagttggtgaagaagttgaaatcgttggtatcaaagagactcagaagtctacctgtactggcgttgaaatgttccgcaaactgctggacgaaggccgtgctggtgagaacgtaggtgttctgctgcgtggtatcaaacgtgaagaaatcgaacgtggtcaggtactggctaagccgggcaccatcaagccgcacaccaagttcgaatctgaagtgtacattctgtccaaagatgaaggcggccgtcatactccgttcttcaaaggctaccgtccgcagttctacttccgtactactgacgtgactggtaccatcgaactgccggaaggcgtagagatggtaatgccgggcgacaacatcaaaatggttgttaccctgatccacccgatcgcgatggacgacggtctgcgtttcgcaatccgtgaaggcggccgtaccgttggcgcgggcgttgtagcaaaagttctgagctaattgccgataacatttgacgcaatgcgcactaaaagggcatcatttgatgccctttttgcacgctttcgtaccagaacctggctcatcagtgattttctttgtcataatcattgctgagacaggctctgttgagggcgtataatccgaaaagctaatacgcgtttcgatttggtttgcctcgcgatcgcggggtgaaaatgtttgtagaaaacttctgacaggttggtttatgagtgcgaataccgaagctcaaggaagcgggcgcggcctggaagcgatgaagtgggtcgttgtggtggcattgctcctggtggcgattgtcggcaactatctttatcgcgacattatgctgccgctgcgtgcgctggccgtagtaattctgattgctgcagcgggtggtgtcgcgctgttaacgacaaaaggtaaagctaccgttgcttttgcccgtgaagcgcgtaccgaagtccgtaaggtcatttggccgactcgccaggaaacattgcacaccacgctgattgtggctgcggttaccgcagtaatgagtctgatcctgtggggactggatggtattctggttcgcctggtatcctttatcactggcctgaggttctgagatgtctgaagctcctaaaaagcgctggtacgtcgttcaggcgttttccggttttgaaggccgcgtagcaacgagcctgcgtgagcatatcaaattacacaacatggaagatttgtttggtgaagtcatggtaccaaccgaagaagtggttgaaatccgtggcggtcagcgtcgcaaaagcgaacgtaaattcttccctggctacgtcctcgttcagatggtgatgaacgacgcgagctggcacctggtgcgcagcgtaccgcgtgtgatgggcttcatcggcggtacttccgatcgtcctgcgccaatcagcgataaagaagtcgatgcgattatgaaccgcctgcagcaggttggtgataagccgcgtccgaaaacgctgtttgaaccgggtgaaatggtccgtgttaatgatggtccgttcgctgacttcaacggtgttgttgaagaagtggattacgagaaatctcgtctgaaagtgtctgtttctatcttcggtcgtgcgaccccggtagagctggacttcagccaggttgaaaaagcctaacccagcgatcaaaaaagcggcgatttaatcgttgcacaaggcgtgagattggaatacaatttcgcgccttttgtttttatgggccttgcccgtaaaacgattttttatatcacggggagcctctcagaggcgttattacccaacttgaggaatttataatggctaagaaagtacaagcctatgtcaagctgcaggttgcagctggtatggctaacccgagtccgccagtaggtccggctctgggtcagcagggcgtaaacatcatggaattctgcaaagcgttcaacgcaaaaactgattccatcgaaaaaggtctgccgattccggtagtaatcaccgtttacgctgaccgttctttcactttcgttaccaagaccccgccggcagcagttctgctgaaaaaagcggctggtatcaagtctggttccggtaagccgaacaaagacaaagtgggtaaaatttcccgcgctcagctgcaggaaatcgcgcagaccaaagctgccgacatgactggtgccgacattgaagcgatgactcgctccatcgaaggtactgcacgttccatgggcctggtagtggaggactaagaaatggctaaactgaccaagcgcatgcgtgttatccgcgagaaagttgatgcaaccaaacagtacgacatcaacgaagctatcgcactgctgaaagagctggcgactgctaaattcgtagaaagcgtggacgtagctgttaacctcggcatcgacgctcgtaaatctgaccagaacgtacgtggtgcaactgtactgccgcacggtactggccgttccgttcgcgtagccgtatttacccaaggtgcaaacgctgaagctgctaaagctgcaggcgcagaactggtaggtatggaagatctggctgaccagatcaagaaaggcgaaatgaactttgacgttgttattgcttctccggatgcaatgcgcgttgttggccagctgggccaggttctgggtccgcgcggcctgatgccaaacccgaaagtgggtactgtaacaccgaacgttgctgaagcggttaaaaacgctaaagctggccaggttcgttaccgtaacgacaaaaacggcatcatccacaccaccatcggtaaagtggactttgacgctgacaaactgaaagaaaacctggaagctctgctggttgcgctgaaaaaagcaaaaccgactcaggcgaaaggcgtgtacatcaagaaagttagcatctccaccaccatgggtgcaggtgttgcagttgaccaggctggcctgagcgcttctgtaaactaatgcctttacgtgggcggtgattttgtctacaatcttacccccacgtataatgcttaatgcagacgtatatccgagatattcgggttgtggcaaggcggcaactgagtgagtcgccaggagcatagctaactatgtgactggtgcgaatgaaggaagccaacgccgtcacaagctgaatagcgacggatagaaaagatttgttcgttggagcctggcctatccaggcctccgtcgaagaccgcaggagtttcgcaagaaacttaatcccctgcgtagacggtgacagaacgctaagattattcttttatattctggcttgtttctgctcaccgtaattaagacgctctctccgtttggaggagtgaagtgagttccagagattttctctggcaaacatccaggagcaaagctaatggctttaaatcttcaagacaaacaagcgattgttgctgaagtcagcgaagtagccaaaggcgcgctgtctgcagtagttgcggattcccgtggcgtaactgtagataaaatgactgaactgcgtaaagcaggtcgcgaagctggcgtatacatgcgtgttgttcgtaacaccctgctgcgccgtgctgttgaaggtactccgttcgagtgcctgaaagacgcgtttgttggtccgaccctgattgcatactctatggaacacccgggcgctgctgctcgtctgttcaaagagttcgcgaaagcgaatgcaaaatttgaggtcaaagccgctgcctttgaaggtgagctgatcccggcgtctcagatcgaccgcctggcaactctgccgacctacgaagaagcaattgcacgcctgatggcaaccatgaaagaagctagcgctggcaaactggttcgtactctggctgctgtacgcgatgcgaaagaagctgcttaatcgcagttatctttttaacgcattcgcttacgtataaacttattctgatattcaggaacaatttaaatgtctatcactaaagatcaaatcattgaagcagttgcagctatgtctgtaatggacgttgtagaactgatctctgcaatggaagaaaaattcggtgtttccgctgctgctgctgtagctgtagctgctggcccggttgaagctgctgaagaaaaaactgaattcgacgtaattctgaaagctgctggcgctaacaaagttgctgttatcaaagcagtacgtggcgcaactggcctgggtctgaaagaagctaaagacctggtagaatctgcaccggctgctctgaaagaaggcgtgagcaaagacgacgcagaagcactgaaaaaagctctggaagaagctggcgctgaagttgaagttaaataagccaacccttccggttgcagcctgagaaatcaggctgatggctggtgactttttagtcaccagcctttttgcgctgtaaggcgccagtagcgtttcacactgtttgactactgctgtgcctttcaatgcttgtttctatcgacgacttaatatactgcgacaggacgtccgttctgtgtaaatcgcaatgaaatggtttaagcgtgatagcaacaggcattgcggaaagtgttccattttccggtcaacaaaatagtgttgcacaaactgtccgctcaatggacagatgggtcgacttgtcagcgagctgaggaaccctatggtttactcctataccgagaaaaaacgtattcgtaaggattttggtaaacgtccacaagttctggatgtaccttatctcctttctatccagcttgacagctttcagaaatttatcgagcaagatcctgaagggcagtatggtctggaagctgctttccgttccgtattcccgattcagagctacagcggtaattccgagctgcaatacgtcagctaccgccttggcgaaccggtgtttgacgtccaggaatgtcaaatccgtggcgtgacctattccgcaccgctgcgcgttaaactgcgtctggtgatctatgagcgcgaagcgccggaaggcaccgtaaaagacattaaagaacaagaagtctacatgggcgaaattccgctcatgacagacaacggtacctttgttatcaacggtactgagcgtgttatcgtttcccagctgcaccgtagtccgggcgtcttctttgactccgacaaaggtaaaacccactctagcggtaaagtgctgtataacgcgcgtatcatcccttaccgtggttcctggctggacttcgaattcgatccgaaggacaacctgttcgtacgtatcgaccgtcgccgtaaactgcctgcgaccatcattctgcgcgccctgaactacaccacagagcagatcctcgacctgttctttgaaaaagttatctttgaaatccgtgataacaagctgcagatggaactggtgccggaacgcctgcgtggtgaaaccgcatcttttgacatcgaagctaacggtaaagtgtacgtagaaaaaggccgccgtatcactgcgcgccacattcgccagctggaaaaagacgacgtcaaactgatcgaagtcccggttgagtacatcgcaggtaaagtggttgctaaagactatattgatgagtctaccggcgagctgatctgcgcagcgaacatggagctgagcctggatctgctggctaagctgagccagtctggtcacaagcgtatcgaaacgctgttcaccaacgatctggatcacggcccatatatctctgaaaccttacgtgtcgacccaactaacgaccgtctgagcgcactggtagaaatctaccgcatgatgcgccctggcgagccgccgactcgtgaagcagctgaaagcctgttcgagaacctgttcttctccgaagaccgttatgacttgtctgcggttggtcgtatgaagttcaaccgttctctgctgcgcgaagaaatcgaaggttccggtatcctgagcaaagacgacatcattgatgttatgaaaaagctcatcgatatccgtaacggtaaaggcgaagtcgatgatatcgaccacctcggcaaccgtcgtatccgttccgttggcgaaatggcggaaaaccagttccgcgttggcctggtacgtgtagagcgtgcggtgaaagagcgtctgtctctgggcgatctggataccctgatgccacaggatatgatcaacgccaagccgatttccgcagcagtgaaagagttcttcggttccagccagctgtctcagtttatggaccagaacaacccgctgtctgagattacgcacaaacgtcgtatctccgcactcggcccaggcggtctgacccgtgaacgtgcaggcttcgaagttcgagacgtacacccgactcactacggtcgcgtatgtccaatcgaaacccctgaaggtccgaacatcggtctgatcaactctctgtccgtgtacgcacagactaacgaatacggcttccttgagactccgtatcgtaaagtgaccgacggtgttgtaactgacgaaattcactacctgtctgctatcgaagaaggcaactacgttatcgcccaggcgaactccaacttggatgaagaaggccacttcgtagaagacctggtaacttgccgtagcaaaggcgaatccagcttgttcagccgcgaccaggttgactacatggacgtatccacccagcaggtggtatccgtcggtgcgtccctgatcccgttcctggaacacgatgacgccaaccgtgcattgatgggtgcgaacatgcaacgtcaggccgttccgactctgcgcgctgataagccgctggttggtactggtatggaacgtgctgttgccgttgactccggtgtaactgcggtagctaaacgtggtggtgtcgttcagtacgtggatgcttcccgtatcgttatcaaagttaacgaagacgagatgtatccgggtgaagcaggtatcgacatctacaacctgaccaaatacacccgttctaaccagaacacctgtatcaaccagatgccgtgtgtgtctctgggtgaaccggttgaacgtggcgacgtgctggcagacggtccgtccaccgacctcggtgaactggcgcttggtcagaacatgcgcgtagcgttcatgccgtggaatggttacaacttcgaagactccatcctcgtatccgagcgtgttgttcaggaagaccgtttcaccaccatccacattcaggaactggcgtgtgtgtcccgtgacaccaagctgggtccggaagagatcaccgctgacatcccgaacgtgggtgaagctgcgctctccaaactggatgaatccggtatcgtttacattggtgcggaagtgaccggtggcgacattctggttggtaaggtaacgccgaaaggtgaaactcagctgaccccagaagaaaaactgctgcgtgcgatcttcggtgagaaagcctctgacgttaaagactcttctctgcgcgtaccaaacggtgtatccggtacggttatcgacgttcaggtctttactcgcgatggcgtagaaaaagacaaacgtgcgctggaaatcgaagaaatgcagctcaaacaggcgaagaaagacctgtctgaagaactgcagatcctcgaagcgggtctgttcagccgtatccgtgctgtgctggtagccggtggcgttgaagctgagaagctcgacaaactgccgcgcgatcgctggctggagctgggcctgacagacgaagagaaacaaaatcagctggaacagctggctgagcagtatgacgaactgaaacacgagttcgagaagaaactcgaagcgaaacgccgcaaaatcacccagggcgacgatctggcaccgggcgtgctgaagattgttaaggtatatctggcggttaaacgccgtatccagcctggtgacaagatggcaggtcgtcacggtaacaagggtgtaatttctaagatcaacccgatcgaagatatgccttacgatgaaaacggtacgccggtagacatcgtactgaacccgctgggcgtaccgtctcgtatgaacatcggtcagatcctcgaaacccacctgggtatggctgcgaaaggtatcggcgacaagatcaacgccatgctgaaacagcagcaagaagtcgcgaaactgcgcgaattcatccagcgtgcgtacgatctgggcgctgacgttcgtcagaaagttgacctgagtaccttcagcgatgaagaagttatgcgtctggctgaaaacctgcgcaaaggtatgccaatcgcaacgccggtgttcgacggtgcgaaagaagcagaaattaaagagctgctgaaacttggcgacctgccgacttccggtcagatccgcctgtacgatggtcgcactggtgaacagttcgagcgtccggtaaccgttggttacatgtacatgctgaaactgaaccacctggtcgacgacaagatgcacgcgcgttccaccggttcttacagcctggttactcagcagccgctgggtggtaaggcacagttcggtggtcagcgtttcggggagatggaagtgtgggcgctggaagcatacggcgcagcatacaccctgcaggaaatgctcaccgttaagtctgatgacgtgaacggtcgtaccaagatgtataaaaacatcgtggacggcaaccatcagatggagccgggcatgccagaatccttcaacgtattgttgaaagagattcgtagcctgggtatcaacatcgaactggaagacgagtaattctcgctcaaacaggtcactgctgtcgggttaaaacccggcagcggattgtgctaactccgacgggagcaaatccgtgaaagatttattaaagtttctgaaagcgcagactaaaaccgaagagtttgatgcgatcaaaattgctctggctagcccagacatgatccgtagttggtctttcggtgaagttaaaaagccggaaaccatcaactaccgtacgttcaaaccagaacgtgacggccttttctgcgcccgtatctttgggccggtaaaagattacgagtgcctgtgcggtaagtacaagcgcctgaaacaccgtggcgtcatctgtgagaagtgcggcgttgaagtgacccagactaaagtacgccgtgagcgtatgggccacatcgaactggcttccccgactgcgcacatctggttcctgaaaagcctgccgtcccgtatcggtctgctgctcgatatgccgctgcgcgatatcgaacgcgtactgtactttgaatcctatgtggttatcgaaggcggtatgaccaacctggaacgtcagcagatcctgactgaagagcagtatctggacgcgctggaagagttcggtgacgaattcgacgcgaagatgggggcggaagcaatccaggctctgctgaagagcatggatctggagcaagagtgcgaacagctgcgtgaagagctgaacgaaaccaactccgaaaccaagcgtaaaaagctgaccaagcgtatcaaactgctggaagcgttcgttcagtctggtaacaaaccagagtggatgatcctgaccgttctgccggtactgccgccagatctgcgtccgctggttccgctggatggtggtcgtttcgcgacttctgacctgaacgatctgtatcgtcgcgtcattaaccgtaacaaccgtctgaaacgtctgctggatctggctgcgccggacatcatcgtacgtaacgaaaaacgtatgctgcaggaagcggtagacgccctgctggataacggtcgtcgcggtcgtgcgatcaccggttctaacaagcgtcctctgaaatctttggccgacatgatcaaaggtaaacagggtcgtttccgtcagaacctgctcggtaagcgtgttgactactccggtcgttctgtaatcaccgtaggtccatacctgcgtctgcatcagtgcggtctgccgaagaaaatggcactggagctgttcaaaccgttcatctacggcaagctggaactgcgtggtcttgctaccaccattaaagctgcgaagaaaatggttgagcgcgaagaagctgtcgtttgggatatcctggacgaagttatccgcgaacacccggtactgctgaaccgtgcaccgactctgcaccgtctgggtatccaggcatttgaaccggtactgatcgaaggtaaagctatccagctgcacccgctggtttgtgcggcatataacgccgacttcgatggtgaccagatggctgttcacgtaccgctgacgctggaagcccagctggaagcgcgtgcgctgatgatgtctaccaacaacatcctgtccccggcgaacggcgaaccaatcatcgttccgtctcaggacgttgtactgggtctgtactacatgacccgtgactgtgttaacgccaaaggcgaaggcatggtgctgactggcccgaaagaagcagaacgtctgtatcgctctggtctggcttctctgcatgcgcgcgttaaagtgcgtatcaccgagtatgaaaaagatgctaacggtgaattagtagcgaaaaccagcctgaaagacacgactgttggccgtgccattctgtggatgattgtaccgaaaggtctgccttactccatcgtcaaccaggcgctgggtaaaaaagcaatctccaaaatgctgaacacctgctaccgcattctcggtctgaaaccgaccgttatttttgcggaccagatcatgtacaccggcttcgcctatgcagcgcgttctggtgcatctgttggtatcgatgacatggtcatcccggagaagaaacacgaaatcatctccgaggcagaagcagaagttgctgaaattcaggagcagttccagtctggtctggtaactgcgggcgaacgctacaacaaagttatcgatatctgggctgcggcgaacgatcgtgtatccaaagcgatgatggataacctgcaaactgaaaccgtgattaaccgtgacggtcaggaagagaagcaggtttccttcaacagcatctacatgatggccgactccggtgcgcgtggttctgcggcacagattcgtcagcttgctggtatgcgtggtctgatggcgaagccggatggctccatcatcgaaacgccaatcaccgcgaacttccgtgaaggtctgaacgtactccagtacttcatctccacccacggtgctcgtaaaggtctggcggataccgcactgaaaactgcgaactccggttacctgactcgtcgtctggttgacgtggcgcaggacctggtggttaccgaagacgattgtggtacccatgaaggtatcatgatgactccggttatcgagggtggtgacgttaaagagccgctgcgcgatcgcgtactgggtcgtgtaactgctgaagacgttctgaagccgggtactgctgatatcctcgttccgcgcaacacgctgctgcacgaacagtggtgtgacctgctggaagagaactctgtcgacgcggttaaagtacgttctgttgtatcttgtgacaccgactttggtgtatgtgcgcactgctacggtcgtgacctggcgcgtggccacatcatcaacaagggtgaagcaatcggtgttatcgcggcacagtccatcggtgaaccgggtacacagctgaccatgcgtacgttccacatcggtggtgcggcatctcgtgcggctgctgaatccagcatccaagtgaaaaacaaaggtagcatcaagctcagcaacgtgaagagcgttgtgaactccagcggtaaactggttatcacttcccgtaatactgaactgaaactgatcgacgaattcggtcgtactaaagaaagctacaaagtaccttacggtgcggtactggcgaaaggcgatggcgaacaggttgctggcggcgaaaccgttgcaaactgggacccgcacaccatgccggttatcaccgaagtaagcggttttgtacgctttactgacatgatcgacggccagaccattacgcgtcagaccgacgaactgaccggtctgtctagcctggtggttctggattccgcagaacgtaccgcaggtggtaaagatctgcgtccggcactgaaaatcgttgatgctcagggtaacgacgttctgatcccaggtaccgatatgccagcgcagtacttcctgccgggtaaagcgattgttcagctggaagatggcgtacagatcagctctggtgacaccctggcgcgtattccgcaggaatccggcggtaccaaggacatcaccggtggtctgccgcgcgttgcggacctgttcgaagcacgtcgtccgaaagagccggcaatcctggctgaaatcagcggtatcgtttccttcggtaaagaaaccaaaggtaaacgtcgtctggttatcaccccggtagacggtagcgatccgtacgaagagatgattccgaaatggcgtcagctcaacgtgttcgaaggtgaacgtgtagaacgtggtgacgtaatttccgacggtccggaagcgccgcacgacattctgcgtctgcgtggtgttcatgctgttactcgttacatcgttaacgaagtacaggacgtataccgtctgcagggcgttaagattaacgataaacacatcgaagttatcgttcgtcagatgctgcgtaaagctaccatcgttaacgcgggtagctccgacttcctggaaggcgaacaggttgaatactctcgcgtcaagatcgcaaaccgcgaactggaagcgaacggcaaagtgggtgcaacttactcccgcgatctgctgggtatcaccaaagcgtctctggcaaccgagtccttcatctccgcggcaagcttccaggagaccactcgcgtgctgaccgaagcagccgttgcgggcaaacgcgacgaactgcgcggcctgaaagagaacgttatcgtgggtcgtctgatcccggcaggtaccggttacgcgtaccaccaggatcgtatgcgtcgccgtgctgcgggtgaagctccggctgcaccgcaggtgactgcagaagacgcatctgccagcctggcagaactgctgaacgcaggtctgggcggttctgataacgagtaatcgttaatccgcaaataacgtaaaaacccgcttcggcgggtttttttatggggggagtttagggaaagagcatttgtcagaatatttaaggaatttctgaatactcataatcaatgtagagatgactaatatcctgaaactgactgaactaattgagtcaaactcggcaaggattcgatactattcctgtgtaactttcttaaggaacgagaatgaaacaggaagtggaaaagtggcgaccttttggacatccggatggtgatattcgtgatttaagttttcttgatgctcatcaggctgtctacgttcagcatcatgagggcaaagagcctttagagtatcgcttttgggttacctactctcttcactgcttcacaaaagattatgaacatcagacgaacgaagaaaaacaaagcttaatgtaccacgcgcctaaagaatctcgtcccttctgccagcaccgttataacttagcgcgcacacacttaaaaagaactattttggcgctgccagaaagcaacgttattcatgccgggtatggtagctatgccgtgattgaggtggacttagacggaggagataaggcattttactttgttgcgttcagggctttcagggaaaagaaaaaactccgtttgcatgtaactagcgcttatcccatttctgaaaaacagaaaggtaaaagtgtgaaatttttcaccattgcctacaacttattgagaaataagcagcttcctcagcccagtaaataacaaaacccaccttaaggtgggtttcgccagagaattatctctggtattcagaacgccattaccggactttgccttgaccttgcgataatcgcaggttgcgggatgtctgaatttcttcagtctgctgcatcctggaagatgagaacatgtgttcttattttcgtctctatcatagttgagtatttactctcttacaatcagatctctttcattgctcaacaggcgatggcttcagactttgcattacggaatttttaagaaaggcagggcgaaacgaggaagaagcttttcgccctggacaacattcctgctgacggcactaccataaaaaaacacaacgctttcaacaaccttgcgtttttcatcttccgtagcggctcggaataaatttacgttcttacattccgtctcatagtctttggctggcgcgtcccagatagctgtcccagtctttccataccggctgcaaaccctgagcggttaacgcggcagcaaccgcttccggtctgcgatcgtcgtgcggactgaactgttccaactcggggtgattatcggcatagccacctggctgcgttttgctgaaggcgctgacgttattgatcgccagcggaataacgcgatcgcgaaaccacggactttcccgcgtggagagactcagttcaatctccggtgcaagcagtcggaaggcgcagatggtttgcactaactggcgttcatccataatgctcgcaggctcaatgccgccagtacacgggcgcaggcgcggaaaggagacagagtaacggctttgccagtaatgctgttgcagccatagcaaatgttcggcaaccatatagctgtcaacgcgccagttgtcggaaaggccaattagcgcgccgaggcctatcttatcaatccccgcacgccccagccgatccggcgtttccagccgccagaagaagtcctgttttttgcctttcagatgatggcgggcataagtcgcctcgtgatatgtctcctgataaaccatcacgccatccagaccaagttgctttaactcggcgtattccgtctccgccagcggttgcacttccatctgtagactagagaactgttcacgaagggcagggagatgacgacgaaagtaatccatccccactttcgcctgatgttcaccagtgactaacagcagatgttcaaagcccatctcccgtatagcggcactttccctggcaatatccgcttcatccagcgttttgcgcttgatgcgattactcatggaaaatccacagtacgtgcagtcgttagcgcaaagattggaaagataaagcgggacgtagaaactaactgtgttgccaaatcgctgacgggtcagacgctgcgcccgttgggccagttgttccagatagccactggcggcagggcttaacagcgccatcatgtcgtcgcgggtgagttggctggcatttagcgcccgctctacgtcagcagccgttttgccgttgatacgcaggcggatgtcgtcccagtccagttgtcgccagcgatcgctgaaggttttcatgcgcttgcctccagaaatccggtcagcgggctggtggcatgagcaaaataactgcggctgcccggtccggactgacgtgccagtaggcctgcttctaccgccagacgaaatgccttcgccatgttgacgggatcgtccgcgacggcaatcgccgtattcactaacaccgcgtcggcccccatttccagcgcctgcgcggcatggctgggaacgccgatgccagcatcgacaaccaccggcactgtggcctgctggataataatctccagcatggcgcgggtttccagtccctgattgctgccaatcggcgcgccgagcggcatcaccgctgcacagccgacttcttccagacgtttacacaataccggatcggccccgcagtaaggcagcacgacaaatccctgttgtaccagcgtttcggcggctttcagggtttcgatgggatcgggcaacagccagcgggcgtcagggtgaatctctaattttaaccagtttgtgcctaacgcttcacgagccagatgggcggcgaaaatggcttcttccgctgttttcgccccggatgtatttggcagcagggtcacacccgccgcgataagcggttcgaggatagcgtcgttgtgctggcgcaagtcgacacgtttcatcgccagtgtcaccagctggctgccggaagcgcggatcgcctccaccatcagttgactagaagcgaatttccctgtgccggtaaacagatgactatcaaacgttttgtccgcaatacgtaacatttcaaccccctgcaataacctgaaaaagcaggatctggtcgccatcctgcacgatatgttgcgcccactgctcacgcgggacgatttgctgattaatcgccagagccgcgcccgcttgtcgttggtcgagttgctccagtagttcgtgaacagtttgcccggcggcgcactgcatcgcttgatcgttaaacaggatctgcattgcttcctccgcataccgggcaaccactggcgcggcgcaacgccaggctgcgccactggctgcttttaccgtcgaacagtcggagttctcccgcaggtgtctctataccgcttaataacttaatggcttccagtgcctgcaaagtgcccataaccccgaccaccgggccaaccacgcccgccgtgcggcagttgcgttctggctcctggttatctggccacaggcagcggtaacacccctgctcccagggcggcgtcagtaccatcaactgaccgccaaatccgaccgcgctggcggtgataagcggcgtgttgagtgccacgcaggcggcattaatctcctggcgagtcgccatattgtcggtacagtcgagcaccacatcggcccgtgcaaccgcatcttttaacgcctcacccgttaaccgttgttgtaatgctgtcagttgaatgtcgggattcaactgtgtcagtcgctgttggctgacctggcttttcgggcgatcgatatcttcagtggtaaagaggatttgtcgttgcagattgcttaaatgcacatcgtcgtcatctgccagtaccagcgtcccgacgccagcgcccgccaggtacagcgcagcaggtgtacccagcccgcccagaccgataatcagcacctggctgtcgagcagtttttgctgcccgtccagagcgatatcgtcgagcaggatttggcggctataacgcataaagtcacggtcattcatcgccaactcctgcaatttccagcaactgtgccgttgccaaacgccagtctgcggcttgagtaatggcgctgacgacggcgatactgccgacacccgttgctatcaccgcaggcgcgcgtgccagactgataccgccaatcgccacggtgggataatccgccagtcgctcaacatgccgtgccagctgttccagcccctgcggtgcagaaggcatctgtttggtttgcgtcgggaacacatgtcccagcgcgatataagaggggcgtgctgccagcgcgacgtcgatttccatatcgtcatgtgtgctaacgcccagccgcaggcctgccgcgcggatggcattgagatcggtggcttgcaaatcttcctgccccaaatggacgccatacgcctgatgcttgatcgccagccgccagtaatcgttgataaacaatcgcgcgttatagcggcggcccagcgcaattgccgccacgacatcggcttccacctcttcatcgcgccgatctttgatgcgtagctggagagtacgtacgcctgcatccaacagacgttcgatccactgtacgctgtccaccaccgggtacagtccactacgaaaaggtacaggaggaaaatcaggctgatacatcacgcttcctccttacgcaggtagatttctccgcctctggcacggaagttctcgctcatatccgccattcccatttcaatagtttgcgtggcggcgtaatcacgcacttcctggctgattttcatgctgcagaatttcggcccacacatggagcaaaaatgggcgactttaccactctcttgcggcagggtttcatcgtgataagcgcgggcggtaaacgggtcgagggccagattaaactggtcttcccagcgaaattcgaagcgggctttgctcatggcgttatcgcgaatttgcgcgcccggatgccctttcgccaggtcagcggcgtgggcagcaatcttataggtgataagcccctgcttaacatcttctttattgggcagacccagatgctcttttggcgttacgtaacagagcatcgcgcagccaaaccagccaatcatcgccgcaccaatcccgctcgtgaagtggtcatagcccggcgcaatatcggtagttagcggccccagagtgtaaaacggcgcttcgtggcagtgctctaactcctcggtcatattgcggcggatcatctgcatcggcacgtggcctgggccttcaatcatcacctgcacgtcatattcccaggcaattttggtcagttcgcccagcgtatgcagctcggcaaactgcgcttcatcgttggcgtcctgaatagaaccggggcgcagaccgtcgcccaggctcaggctaacgtcataagcggcacagatttcacaaatttcgcggaagtgttgatagaggaaattttcctgatgatgggagaggcaccatttcgccataatgctaccgccgcgagagacgataccggtcaggcgtttcgcggtcatcggcacatagcgcagcagtacgcccgcatggatagtgaagtaatccacaccttgctcggcctgttccagcagcgtgtcgcggaacgcttcccaggtaagatcttcggcgatcccgttaaccttctccagcgcctggtagatcggcactgtaccgatcggcaccgggctgttacgcaaaatccactcgcgggtttcgtgaatatagcgaccggtggagagatccatcaccgtatccgctccccagcgcgtggaccataccagcttttccacttcttcttcgatggaagaggtgaccgcgctgttgccgatattggcgttaacttttaccaggaaattgcgaccaataatcatcggctcgctttccggatgattaatgttggccgggataatcgcacgtccggcagcaacttcatcacggacaaattccgcagtgatattttccggcagatgtgcgccaaagctcattcccggatgctggtggcgtaaaacctcgctacggatgcgctcgcggcccatattctcgcggatggcgatgaattccatttccggcgtgatgatgccctggcgggcgtagtgcagttgggtgacacggcgtcctgctttggcgcgttttggtgttagtacgccgctaaaacgcagttcgtcgaggccatcatctgccagccgcgctttagtgtaatcggaactgcgcacggtaagttcttcggtatcgccgcgcgcatcgatccacggctggcgtagttttgccagcccttgctgcacgttaatggcaatctgcggatcaccatacgggccggaggtgtcgtagaccggaatcgcttcgttttcttcgtactgcggctgttctttgctaccgccaattagcgtcgggctaagctggatctcacgcatcggcacgcgcacgccggggtgtgtgccagtgatataaatgcgtttactgttgggaaaggcggtgccttccagggtgtcgataaaatgttgggcccgggcgcgttgttcgcggcgggtcagttttgttgcagacatagctcattccaaaaagttaaggacgtggcttgtcagacgacggatgaagcaagagacgatcgccgcaggggcgatgcgatagcagattaactcttgttcccttcgcaggtattagcctgatcaggttccgcggatcccgaataaacggtctcagccagttaaggcactccgacaagaaattagccccgcaaatggggcattgaatgtaaattacgcgttaacagcgcagaactcaagcaggatgtttgacgcgggcggcgtcaagcaccagcagaatcagcttatcttccagcacaaagcgcgcttccagcgcctcgccgatgtcagataaaacctgttgaaactcaaggtaattatcatgatcgatggcggtttccagactggaatcgtagtaatccataatctgttgagtattggcttcgagttgcggccaaatcttcgcggcgcgcgcgagttgcccgttgccttccagcttatgaagaatgcgctcataaatactgaaatgtccggcagacaagtaatcgaccaggctctgacaaaaatcatcaagggctttttcgtttagcctcatgtagctttctttgccaggcttaatgccaaccagattgtagtaagccacgagcagatgcttacgtacatgtagccagcgatcaaccagtttgttacttcctctgacgcgctccgtcaggttatcgagctggttaagcatgattgactccgcaagtttgtattcaaaaactgctcagtgagaaatgtaaaaaccatgttaaacatgccagtgatgcaaaggtagtgcaagagctatggatcgtataattgaaaaattagatcacggctggtgggtcgtcagccatgaacaaaaattatggttgccgaagggagaattgccatatggcgaagcggcaaatttcgatcttgtgggtcagcgcgcactacaaatcggcgaatggcagggggaacctgtttggttagtacaacagcagcggcgtcacgatatggggagcgtacgtcaggtcattgatctcgatgttgggctgtttcaactggccggacgaggcgtacaactggcggagttttaccgaagtcataaatactgtggttactgcgggcatgaaatgtatccgagcaaaaccgaatgggcgatgctgtgcagccattgccgtgagcgttactacccgcaaatcgccccctgcattattgttgccatccgtcgcgatgatagcatcctcctcgcccagcatacccgccatcgtaacggtgtccatacagtacttgccggattcgtcgaagtgggcgaaaccctcgagcaggcagtcgcgcgggaagtgatggaagagagcggaattaaagttaaaaacttgcgttacgtgacttctcagccgtggccgtttcctcagtctttaatgaccgcgtttatggcggaatatgacagcggcgacatcgtgatcgacccgaaagaattgctcgaggcgaactggtatcgctatgacgatttgccgttactcccgccgcccggcaccgtagcgcgccgtctgatagaagatacggtggcgatgtgtcgggcagagtatgagtgatgatacactgaccgcctgacgcactaaggaacagccaaaatgaccgaacttaaaaacgatcgttatctgcgggcgctgctgcgccagcccgttgatgtcactccagtatggatgatgcgccaggcgggtcgctatctaccggaatataaagccacgcgcgcccaggcaggcgattttatgagcctgtgcaaaaacgccgagctggcgtgcgaagtgactttgcaaccgctgcgtcgctacccgctggatgcggcgatcctcttttccgatatcctcaccgtgccggacgcgatggggttagggctctattttgaagccggagaaggtccgcgttttaccagcccagtcacctgcaaagctgacgtcgataaactgccaattccggacccggaagatgaactgggttacgtgatgaacgcggtgcgtaccattcgtcgcgaactgaaaggcgaagtgccgctgattggtttttccggcagcccgtggacgctggcgacctacatggtggaaggcggcagcagcaaagccttcaccgtgatcaaaaaaatgatgtatgccgatccgcaggcgctgcacgctctgctcgataaactggcgaaaagcgtcactttgtatctgaatgcgcagattaaagccggtgctcaggcagtgatgattttcgacacctggggcggcgtgcttaccgggcgcgattatcaacagttcagcctctattacatgcataaaattgttgatggtttactgcgtgaaaacgacggtcgccgcgtaccggtcacgctgtttaccaaaggcggcggacagtggctggaagccatggcagaaaccggttgcgatgcgctgggcctcgactggacaacggacatcgccgatgcgcgccgccgtgtgggcaataaagtcgcgttgcagggtaatatggatccgagcatgctgtacgcgccgcctgcccgcattgaagaagaagtagcgactatacttgcaggtttcggtcacggcgaaggtcatgtctttaaccttggtcacggcattcatcaggatgtgccgccagaacatgctggcgtgttcgtggaggcagtgcatcgactgtctgaacagtatcaccgctaaggagtgattatggatctcgcgagtttacgcgctcaacaaatcgaactggcttcttctgtgatccgcgaggatcgactcgataaagatccaccggatctgatcgccggagccgatgtcgggtttgagcagggcggagaagtgacgcgagcggcgatggtgctgctgaaatatcccagccttgagctggtcgagtataaagttgcccgcatcgccaccaccatgccttacattccaggttttctttccttccgcgaatatcctgcgctgctggcagcgtgggagatgctgagccaaaagccggatttagtgtttgtcgatggtcatgggatcagccatcctcgccgtcttggcgtcgccagccattttggcttattggtggatgtgccgaccattggcgtggcgaaaaaacggctctgcggtaaattcgaaccgctctccagcgaaccgggcgcgctggccccactgatggataaaggcgagcagctggcctgggtctggcgcagcaaagcgcgctgtaacccgttgtttatcgctaccggccatcgggtcagcgtggacagcgcgctggcgtgggtacaacgctgcatgaaaggctatcgtctgccggagccaacgcgctgggcggacgcggtggccagcgaacgtccggcgttcgtgcgctatacagcaaatcagccctaattcaggtaaactgcggataatttccgtatttgagaactcaacatgttacaaaacccaattcatctgcgtctggagcgcctggaaagctggcagcatgtcactttcatggcttgcttatgcgaacgcatgtaccccaattacgccatgttctgccagcaaaccggttttggtgatgggcaaatttaccgtcgcattctcgatctcatctgggaaacgctgaccgttaaagacgcaaaagtaaatttcgacagccaactggagaaatttgaagaagcgattcctagtgccgacgatttcgatctgtacggcgtttatccggcaatcgatgcctgcgtggcgttaagtgaactggtccatagccgtttgagtggtgaaacgctcgaacacgcggtggaagtgagtaagacctccatcacgaccgttgcgatgctggaaatgactcaggctggtcgcgaaatgagcgatgaagagcttaaagaaaacccagctgtagagcaagaatgggacattcagtgggaaatattccgacttttagctgagtgcgaagaacgcgatatcgagctgataaaaggccttagggcagacctgcgtgaggcgggtgagagcaatattggtataatttttcagcaataagaccagaaaacgtgatttaacgcctgatttgtcgtacctggagtcttccctttcgcccccgtctggtctacatttggggggcgaaaaaaagtggctatcggtgcgtgtatgcaggagagtgctattctggcatttccgtcgcactcgatgcttagcaagcgataaacacattgtaaggataacttatgaacaagactcaactgattgatgtaattgcagagaaagcagaactgtccaaaacccaggctaaagctgctctggagtccactctggctgcaattactgagtctctgaaagaaggcgatgctgtacaactggttggtttcggtaccttcaaagtgaaccaccgcgctgagcgtactggccgcaacccgcagaccggtaaagaaatcaaaattgccgcagctaacgtaccggcatttgtttctggcaaggcactgaaagacgcagttaagtaagattgcgtggcagtgaacagttttaacgaaggggtggttagtccccttttgtctttctggcgtcgaagtttgatgctggctggcgctctgcttctcactgcctgtagtcataactctagtcttcctccctttaccgccagtggatttgctgaagaccagggcgcggtacgcatctggcgaaaagacagcggcgataatgtgcatctgcttgccgtgtttagcccgtggcgcagtggcgataccacgacgcgagagtatcgctggcagggcgataacctcacgctcatcaatatcaatgtttacagcaaaccgccggtgaatattcgcgcgcgttttgacgatcgcggtgatctgagctttatgcaacgtgaatccgatggggaaaagcagcagctttctaacgaccaaatcgatttataccgttatcgtgctgatcagatccgccagattagcgatgccttacgtcaggggagagtcgtgctgcgccaggggcgctggcatgcgatggaacagaccgtgaccacctgcgaagggcaaaccattaaacctgatttagatagccaggcgatagcgcatatcgagcgccgccagagccgctcttctgttgatgtcagcgtggcatggctggaagcgcccgaaggtagccaattactgttagtggcaaactctgatttctgtcgctggcaacccaacgagaaaacgttctgatttaccagtggcccatacccatatgaccgccaccaccgcagccgccgtagcccatgcccattccggctccgcgcggaatacccgcttcagccatcgcgatatctcgtttcacccgtaactcatctaagctctgacgcaaattctccatctctttggcgaccgcgttaattttgctgctatccggtgggttcgcggctaacagggcattgtattcataacgcttcgtcaccagttgctgttgcagtgcgctgctttgagcgtaaaagtcattatggattttctgccacgctgtctgttgttcgctggtcaaaggcgcggcattttgctgccacataccgtgtccgccgtgagcaaatgcagatgtgcttcccatcgccattgcactaagcgccatcattaccagggcaattttcgtgttccgtttcatggttaatcctccagtggttgtcttacttcgggtattgcatcttccgtgccaacgatgaaacgctgatatgacgggtaatctggcatgataaacgagtaaaaatgactcgcctgctgcgggtagcgagtcatttttactcattgaaacttaagcctttgtgttacagcgcagggtaagcgctgataaaagatggcatgatttctgctgtcagaaagggatgagcaggcaaagaagaagatgcgttttatgcaacgttctaaagactccttagctaaatggttaagcgcgatcctccccgtggtcattgttgggctggtgggattgtttgcggtaactgtgattcgtgattatgggcgggcaagcgaggcagaccgccaggcattactggaaaaaggtaatgtgcttatccgcgctctggagagcggaagccgcgtagggatggggatgcgaatgcaccatgtacagcaacaggcgcttctggaagagatggcgggacagccgggagtgttgtggttcgcagtcaccgatgcgcagggcatcattattcttcatagcgaccccgataaggtcgggcgtgcgctctatagcccggatgaaatgcagaaattaaagccagaggaaaactcccgctggcggctgcttgggaaaacggaaactacgcctgcacttgaggtctatcgtttgttccagccaatgagtgcgccctggcggcatggaatgcacaatatgccgcgctgtaacggcaaagctgtgccacaagtagatgcacaacaggctatttttatcgccgttgatgccagtgatctggttgcaacccagagtggggaaaagcgcaataccctgattatcctcttcgccctggcgacggtcttgctggcaagcgtattgagtttcttctggtatcgccgctatctgcgcagccgccagcttctacaagatgaaatgaagcgcaaagagaagctggtggcgctggggcatcttgcggcaggcgttgcccacgaaatccgtaacccactttccagcattaaaggactggcgaaatactttgccgagcgcgcgcctgcagggggagaagcgcatcaactggcgcaggtgatggcgaaagaggccgaccgtttaaaccgcgtggtaagcgagttgctggaactggttaagccaacgcatctggctttgcaggcggtggatctcaacacgctgattaaccacagtttacagctggtaagtcaggatgcaaacagccgggagatccagttacgctttaccgccaacgacacattaccggaaattcaggccgacccggacaggctgactcaggtcctgttgaatctctatctcaatgctattcaggcgattggtcagcatggcgtgattagcgtgacggccagcgaaagcggcgcgggcgtgaaaatcagcgttaccgacagcggtaagggaattgcggcagatcagcttgatgccatcttcactccgtacttcaccactaaagccgaaggcaccggattggggctggcggtcgtgcataatattgttgaacaacacggtggtacaattcaggtcgcaagccaggagggaaaaggcagtacgttcaccctctggcttccggtcaatattacgcgtaaggacccacaaggatgacgcacgataatatcgatattctggtggtggatgatgacattagccactgcactattttgcaggctttactgcgcggctggggctataacgtcgcgctggcgaacagcgggcgacaggcgttggagcaggtgcgggaacaggtttttgatcttgtgctttgcgatgtgcgaatggcggagatggacggcatcgccacgctgaaagagatcaaagcgttaaacccggcaattccggtgctgattatgactgcgtactccagcgtcgagacggcggtagaggcactgaaaactggggcgctggattatctcatcaagccgctggatttcgataacctacaggcgacgctggaaaaagcgctcgcgcatacgcacagtattgatgctgaaacacctgcggtgactgccagccagttcggtatggtcggtaaaagcccggcgatgcaacacctgctcagtgaaatcgccctcgtcgcgccaagcgaagccacggtactgatccacggcgattccggcaccggtaaagagctggtcgccagggcgattcacgccagtagcgcacgtagcgaaaaaccgctggtaacgctcaactgtgcggcactcaacgaatccttgctggaatctgaattgttcggtcacgaaaaaggggcgtttactggagccgataaacgccgggaagggcgctttgttgaggcggacggcggcacgctgtttctcgatgaaattggcgatatcagcccgatgatgcaggtgcgtctgctgcgtgcgattcaggagcgcgaagttcagcgtgtcggtagcaaccagattatcagcgttgatgtccggctgattgcggcgacccatcgcgatcttgccgcagaggtgaatgccgggcgttttcgccaggatctctactatcgcctgaatgtggtggcgattgaagtaccaagcctgcggcaacggcgggaagatatccctctgctggctggccattttctgcagcgctttgccgagcgtaatcgcaaggcggtaaaaggttttacgccccaggcgatggatctgttgattcattacgactggccgggaaatattcgtgagctggaaaacgcggtggaacgggcagtggtgctgctgaccggggaatatatttccgaacgcgagctgccgctggcgattgccagtacgccgatcccgctgggacaaagtcaggatattcagccgttggtggaagtggaaaaagaggtgattctggcggcgctggagaaaacgggcggcaacaaaaccgaagccgcccgtcagttagggatcacgcgcaaaacgctattggcaaaactgagccgttaattctgctcgcgttcgatagcgcgccagccgatatctttccggcagaagcagtcgtcccagtggatatcggtcattaaggcataggcgcgtttctgcgcttctgccacggtatgacccagcgcggtgacgcacagtacgcgcccgccgttggtcactacctgctcgtcatccgccagttttgtgcccgcgtggaacactttgccgcctgccacttcttccagcggcaggccgtggatcacgtcaccggtgcggtaatcacccggatatccacccgcagccatcaccacgccgagagaagcgcgttcatcccactcggacgttttctcgtccagtttgctttcacaggccgccaggcagagctcaaccagatcggacttcatgcgcagcataatcggctgggtttccggatcgccaaagcggcagttaaattcaataaccttcggattgccctgtttgtcgatcatcaggcccgcgtagagaaaaccggtgtaggtgttgccttccgccgccatgcctttcacggttggccagataatacgttccatggtgcgctgatgaacgtcatcggttactaccggcgcgggggagtaagcgcccatcccgccggtgtttggtccggtatctttatcgcctacgcgtttgtgatcctggctggtagccatcggcagcacatgctcgccgtccaccatcacgataaagctcgcttcttcgccatcgaggaactcttcgataacgatgcgatgacccgcgtcgccaaaagcgttgcccgccagcatatcgtgaacagccgcttccgcttcttccagcgtcatcgccacgataacgcctttcccggcagccagaccgtccgctttaatgacgattggcgcgcctttctcacgcagatacgccagcgcaggttctacctcggtgaagttctggtattccgccgtagggatcttatggcgggccaggaaatctttggtaaacgctttactgccttccagttgggccgcacctgcggttgggtcgaagattttcagcccggcggcgcggaaggtatcgaccacgcctttcaccagcggcgcttccgggccgacgatggtcagatcaatcttttcgttttgtgcgaaatccaacagcgccgggatatcggtcacgccaatagcaacgttttgcagcgcgggttccagtgcagtgcctgcattacccggagcaacaaaaacagtctcaaccagcgggctctgggccgctttccaggccagcgcgtgctcgcgcccgccgttaccaatcactaatactttcatctattgctccattaatggcggaagtggcgcatgtcggtgaagagcatcgcaataccgtgctcgtcggcggcggcaatcacttcgtcatcacggatagaaccgccaggctggattacgcaggtcacgcccgcagcggcggcggcatcaataccgtcgcggaacgggaagaacgcgtcagaagccatgctggaacctttcacttccaggccttcatcggccgctttaataccggcgatttttgcggagtacacgcggctcatctggcccgcgccaatgccgatagtcatattgtttttggcatagacgatagcgttggatttcacaaacttcgccaccttccagcagaacagcgcatcacgcagttcctgttcgctcggctgacgtttggtcaccacgcgcagttcttccgcaccgaccatccccaggtcacgatcctgaaccagcagaccgccgttcacgcgtttgaaatcgaggcccggaacacgctcgccccactgaccgcaggtcagaacgcgtacgttctgtttggcggcggtgattttcagggcttcttcgctggcggacggcgcaataatcacttcgacaaactgacgagaaatgatggcctgtgcggtttccgcatccagctcgcggttaaaggcaatgatgccgccgaatgcggaggttgggtcggttttgtacgcgcgatcgtaagcatcaagaatggaattgccgatagccacgccgcaagggttggcgtgcttcacaatcacacatgccggctcggcgaactctttcacgcactccagcgccgcatcggtatcggcgatgttgttataagagagggctttaccctgaacctgggttgcggtagcaacggaggcttctttcacattctcttctatatagaaggcagcctgctggtggctgttctcgccgtaacgcatatccagcttcttaatgaagttcaggttcagcgtgcgtgggaagcgaccggcggcttctttgctttcaccgtggtaagccggaaccatgctgccgaagtagttggcaatcatgctgtcgtaggcggcagtgtgttcgaaggctttgatggcgaggtcgaaacgggttgcaagcgtcaggcttccttcgttgtcatccatctctttaataatggcgtcatagtcgctgctcttcaccacgattgcgacatctttatggttcttggcggcggagcgcaccatcgttgggccgccgatatcgatgttctcaaccgcatcttccaggctgcaaccttcacgggccacggtctgggcgaacggatacaggttaacaaccaccatatcgataggctggatctgatgttcttccataatggcatcgtcctggccgcgacggcccagaatgccaccatgtactttcggatgcagggtcttcacgcgtccatccatcatctccgggaaaccggtgtaatcggaaacttcggttaccggcagacctttttctgctaacagacgggcagtgccccctgtagacagcagctccacaccgcgtgcggaaagtgcctgggcgaattcgacgataccggctttgtcagaaacactgagcagagcgcggcggactggacgacgttgttgcatggtaaatcccctggatttgactattacagagagcgttagctgaatttttcgcgaaaaactcagctaacgcccctaacggggcatccttatttttcgcccgcattgtaacgaaaacgtttgcgcaacgctcgcgaatttttctctttcaatggtgatcacaattttgactgtggttaccgtgggcaaaatacagaaattacattgatgattgtggataactctgtgcgtaaaaaggtataaagcgggcttttgctggggaatgcagcagtcagtcatttttctgcaatttttctattgcggcctgcggagaactccctataatgcgcctccatcgacacggcggatgtgaatcacttcacacaaacagccggttcggttgaagagaaaaatcctgaaattcagggttgactctgaaagaggaaagcgtaatatacgccacctcgcgacagtgcgctaaagcgcgtcgcaactgctctttaacaatttatcagacaatctgtgtgggcactcgaagatacggattcttaacgtcgcaagacgaaaaatgaataccaagtctcaagagtgaacacgtaattcattacgaagtttaattctttgagcatcaaacttttaaattgaagagtttgatcatggctcagattgaacgctggcggcaggcctaacacatgcaagtcgaacggtaacaggaagaagcttgcttctttgctgacgagtggcggacgggtgagtaatgtctgggaaactgcctgatggagggggataactactggaaacggtagctaataccgcataacgtcgcaagaccaaagagggggaccttcgggcctcttgccatcggatgtgcccagatgggattagctagtaggtggggtaacggctcacctaggcgacgatccctagctggtctgagaggatgaccagccacactggaactgagacacggtccagactcctacgggaggcagcagtggggaatattgcacaatgggcgcaagcctgatgcagccatgccgcgtgtatgaagaaggccttcgggttgtaaagtactttcagcggggaggaagggagtaaagttaatacctttgctcattgacgttacccgcagaagaagcaccggctaactccgtgccagcagccgcggtaatacggagggtgcaagcgttaatcggaattactgggcgtaaagcgcacgcaggcggtttgttaagtcagatgtgaaatccccgggctcaacctgggaactgcatctgatactggcaagcttgagtctcgtagaggggggtagaattccaggtgtagcggtgaaatgcgtagagatctggaggaataccggtggcgaaggcggccccctggacgaagactgacgctcaggtgcgaaagcgtggggagcaaacaggattagataccctggtagtccacgccgtaaacgatgtcgacttggaggttgtgcccttgaggcgtggcttccggagctaacgcgttaagtcgaccgcctggggagtacggccgcaaggttaaaactcaaatgaattgacgggggcccgcacaagcggtggagcatgtggtttaattcgatgcaacgcgaagaaccttacctggtcttgacatccacggaagttttcagagatgagaatgtgccttcgggaaccgtgagacaggtgctgcatggctgtcgtcagctcgtgttgtgaaatgttgggttaagtcccgcaacgagcgcaacccttatcctttgttgccagcggtccggccgggaactcaaaggagactgccagtgataaactggaggaaggtggggatgacgtcaagtcatcatggcccttacgaccagggctacacacgtgctacaatggcgcatacaaagagaagcgacctcgcgagagcaagcggacctcataaagtgcgtcgtagtccggattggagtctgcaactcgactccatgaagtcggaatcgctagtaatcgtggatcagaatgccacggtgaatacgttcccgggccttgtacacaccgcccgtcacaccatgggagtgggttgcaaaagaagtaggtagcttaaccttcgggagggcgcttaccactttgtgattcatgactggggtgaagtcgtaacaaggtaaccgtaggggaacctgcggttggatcacctccttaccttaaagaagcgttctttgcagtgctcacacagattgtctgatagaaagtgaaaagcaaggcgtcttgcgaagcagactgatacgtccccttcgtctagaggcccaggacaccgccctttcacggcggtaacaggggttcgaatcccctaggggacgccacttgctggtttgtgagtgaaagtcacctgccttaatatctcaaaactcatcttcgggtgatgtttgagatatttgctctttaaaaatctggatcaagctgaaaattgaaacactgaacaacgaaagttgttcgtgagtctctcaaattttcgcaacacgatgatgaatcgtaagaaacatcttcgggttgtgaggttaagcgactaagcgtacacggtggatgccctggcagtcagaggcgatgaaggacgtgctaatctgcgataagcgtcggtaaggtgatatgaaccgttataaccggcgatttccgaatggggaaacccagtgtgtttcgacacactatcattaactgaatccataggttaatgaggcgaaccgggggaactgaaacatctaagtaccccgaggaaaagaaatcaaccgagattcccccagtagcggcgagcgaacggggagcagcccagagcctgaatcagtgtgtgtgttagtggaagcgtctggaaaggcgcgcgatacagggtgacagccccgtacacaaaaatgcacatgctgtgagctcgatgagtagggcgggacacgtggtatcctgtctgaatatggggggaccatcctccaaggctaaatactcctgactgaccgatagtgaaccagtaccgtgagggaaaggcgaaaagaaccccggcgaggggagtgaaaaagaacctgaaaccgtgtacgtacaagcagtgggagcacgcttaggcgtgtgactgcgtaccttttgtataatgggtcagcgacttatattctgtagcaaggttaaccgaataggggagccgaagggaaaccgagtcttaactgggcgttaagttgcagggtatagacccgaaacccggtgatctagccatgggcaggttgaaggttgggtaacactaactggaggaccgaaccgactaatgttgaaaaattagcggatgacttgtggctgggggtgaaaggccaatcaaaccgggagatagctggttctccccgaaagctatttaggtagcgcctcgtgaattcatctccgggggtagagcactgtttcggcaagggggtcatcccgacttaccaacccgatgcaaactgcgaataccggagaatgttatcacgggagacacacggcgggtgctaacgtccgtcgtgaagagggaaacaacccagaccgccagctaaggtcccaaagtcatggttaagtgggaaacgatgtgggaaggcccagacagccaggatgttggcttagaagcagccatcatttaaagaaagcgtaatagctcactggtcgagtcggcctgcgcggaagatgtaacggggctaaaccatgcaccgaagctgcggcagcgacgcttatgcgttgttgggtaggggagcgttctgtaagcctgcgaaggtgtgctgtgaggcatgctggaggtatcagaagtgcgaatgctgacataagtaacgataaagcgggtgaaaagcccgctcgccggaagaccaagggttcctgtccaacgttaatcggggcagggtgagtcgacccctaaggcgaggccgaaaggcgtagtcgatgggaaacaggttaatattcctgtacttggtgttactgcgaaggggggacggagaaggctatgttggccgggcgacggttgtcccggtttaagcgtgtaggctggttttccaggcaaatccggaaaatcaaggctgaggcgtgatgacgaggcactacggtgctgaagcaacaaatgccctgcttccaggaaaagcctctaagcatcaggtaacatcaaatcgtaccccaaaccgacacaggtggtcaggtagagaataccaaggcgcttgagagaactcgggtgaaggaactaggcaaaatggtgccgtaacttcgggagaaggcacgctgatatgtaggtgaggtccctcgcggatggagctgaaatcagtcgaagataccagctggctgcaactgtttattaaaaacacagcactgtgcaaacacgaaagtggacgtatacggtgtgacgcctgcccggtgccggaaggttaattgatggggttagcgcaagcgaagctcttgatcgaagccccggtaaacggcggccgtaactataacggtcctaaggtagcgaaattccttgtcgggtaagttccgacctgcacgaatggcgtaatgatggccaggctgtctccacccgagactcagtgaaattgaactcgctgtgaagatgcagtgtacccgcggcaagacggaaagaccccgtgaacctttactatagcttgacactgaacattgagccttgatgtgtaggataggtgggaggctttgaagtgtggacgccagtctgcatggagccgaccttgaaataccaccctttaatgtttgatgttctaacgttgacccgtaatccgggttgcggacagtgtctggtgggtagtttgactggggcggtctcctcctaaagagtaacggaggagcacgaaggttggctaatcctggtcggacatcaggaggttagtgcaatggcataagccagcttgactgcgagcgtgacggcgcgagcaggtgcgaaagcaggtcatagtgatccggtggttctgaatggaagggccatcgctcaacggataaaaggtactccggggataacaggctgataccgcccaagagttcatatcgacggcggtgtttggcacctcgatgtcggctcatcacatcctggggctgaagtaggtcccaagggtatggctgttcgccatttaaagtggtacgcgagctgggtttagaacgtcgtgagacagttcggtccctatctgccgtgggcgctggagaactgaggggggctgctcctagtacgagaggaccggagtggacgcatcactggtgttcgggttgtcatgccaatggcactgcccggtagctaaatgcggaagagataagtgctgaaagcatctaagcacgaaacttgccccgagatgagttctccctgactccttgagagtcctgaaggaacgttgaagacgacgacgttgataggccgggtgtgtaagcgcagcgatgcgttgagctaaccggtactaatgaaccgtgaggcttaaccttacaacgccgaaggtgttttggcggattgagagaagattttcagcctgatacagattaaatcagaacgcagaagcggtctgataaaacagaatttgcctggcggcagtagcgcggtggtcccacctgaccccatgccgaactcagaagtgaaacgccgtagcgccgatggtagtgtggggtctccccatgcgagagtagggaactgccaggcatcaaattagaaaaaccccggtccataaggccggggttttttgcatatcaattatttgcatgatgaagggaatctcatgagtgttctgtatatccaaattcgtcgtaatcaaattactgttcgcgatcttgaaagcaaacgtgaagtgagtggagacgctgccttcagtaaccagcgcctgttaatcgccaatttctttgttgcagaaaaagttctgcaagatcttgttctgcaactccacccacgtagtacctggcattcttttttgccagcaaaacgtatggatattgttgtgagcgcactggaaatgaatgagggcggtttgagtcaggttgaggaacgcattctccatgaagtggtcgctggggcaacgttaatgaaatatcgccagttccacatccatgcgcaaagtgcggtactcagtgatagtgcggtcatggcaatgcttaagcagaaataatcgtgtcaccattggtgggtactaaacctgaagttcagcccaccgggatgagaaaaaatcgcttacgcccccacatacgccagattcagcaacggatacggtttccccaaatcgtccacctcagagcgtcccgtaaccttaaaacccaccttcttatagaacccaaccgcctgctcattttgctcattaacgttggttgtcagttccggtgccatgctgagcgcatgctccaccagcacccgacctacgccgcagccgcgcacatcaggatcgataaacagcgcatccatatgctgcccacttagcaacataaatccaaccggctgatcccgctcattaaccgcgacccacaacggcgcttccggcaggaaggaacgaactaggtcctccagctcggtccgatactctgcacttagaaaatcgtgagtggcatcgacagaacgacaccaaatcgcaacgagttcctccccttcctcatgccgactgcggcgaatactaataaccattttctctccttttagtcattcttatattctaacgtagtcttttccttgaaactttctcaccttcaacatgcaggctcgacattggcaaattttctggttatcttcagctatctggatgtctaaacgtataagcgtatgtagtgaggtaatcaggttatgccgattcgtgtgccggacgagctacccgccgtcaatttcttgcgtgaagaaaacgtctttgtgatgacaacttctcgtgcgtctggtcaggaaattcgtccacttaaggttctgatccttaacctgatgccgaagaagattgaaactgaaaatcagtttctgcgcctgcttagtaacagtcctttgcaggtcgatattcagctgttgcgcatcgattcccgtgaaagccgcaacacgcccgcagagcatctgaacaacttctactgtaactttgaagatattcaggatcagaactttgacggtttgattgtaactggtgcgccgctgggcctggtggagtttaatgatgtcgcttactggccgcagatcaaacaggtgctggagtggagcaaagatcacgtcaccagcacgctgtttgtctgctgggcggtacaggccgcgctcaatatcctctacggcattcctaagcaaactcgcaccgaaaaactctctggcgtttacgagcatcatattctccatcctcatgcgcttctgacgcgtggctttgatgatagtttcctggcaccgcatagccgctatgctgactttccggcagcgttgattcgtgattacaccgatctggaaattctggcagagacggaagaaggggatgcatatctgtttgccagtaaagataagcgcattgcctttatgacgggccatcccgaatatgatgcgcaaacgctggcgcaggaatttttccgcgatgtggaagccggactagacccggatgtaccgtataactatttcccgcacaatgatccgcaaaatacaccgcgagcgagctggcgtagtcacggtaatttactgtttaccaactggctcaactattacgtctaccagatcacgccatacgatctacggcacatgaatccaacgctggattaatcttctgtgatagtcgatcgttaagcgattcagcaccttacctcaggcaccttcgggtgccttttttatttccgaaacgtacctcagcaggtgaataaattttattcatattgttatcaacaagttatcaagtatttttaattaaaatggaaattgtttttgattttgcattttaaatgagtagtcttagttgtgctgaacgaaaagagcacaacgatccttcgttcacagtggggaagttttcggatccatgacgaggagctgcacgatgactgaacaggcaacaacaaccgatgaactggctttcacaaggccgtatggcgagcaggagaagcaaattcttactgccgaagcggtagaatttctgactgagctggtgacgcattttacgccacaacgcaataaacttctggcagcgcgcattcagcagcagcaagatattgataacggaacgttgcctgattttattagcgaaacagcttccattcgcgatgctgattggaaaattcgcgggattcctgcggacttagaagaccgccgcgtagagataactggcccggtagagcgcaagatggtgatcaacgcgctcaacgccaatgtgaaagtctttatggccgatttcgaagatagtctggcaccagactggaacaaagtgatcgacgggcaaattaacctgcgtgatgcggttaacggcaccatcagttacaccaatgaagcaggcaaaatttaccagctcaagcccaatccagcggttttgatttgtcgggtacgcggtctgcacttgccggaaaaacatgtcacctggcgtggtgaggcaatccccggcagcctgtttgattttgcgctctatttcttccacaactatcaggcactgttggcaaagggcagtggtccctatttctatctgccgaaaacccagtcctggcaggaagcggcctggtggagcgaagtcttcagctatgcagaagatcgctttaatctgccgcgcggcaccatcaaggcgacgttgctgattgaaacgctgcccgccgtgttccagatggatgaaatccttcacgcgctgcgtgaccatattgttggtctgaactgcggtcgttgggattacatcttcagctatatcaaaacgttgaaaaactatcccgatcgcgtcctgccagacagacaggcagtgacgatggataaaccattcctgaatgcttacagtcgcctgttgattaaaacctgccataaacgcggtgcttttgcgatgggcggcatggcggcgtttattccgagcaaagatgaagagcacaataaccaggtgctcaacaaagtaaaagcggataaaagcctggaagccaataacggtcacgatggcacatggatcgctcacccaggccttgcggacacggcaatggcggtattcaacgacattctcggctcccgtaaaaatcagcttgaagtgatgcgcgaacaagacgcgccgattactgccgatcagctgctggcaccttgtgatggtgaacgcaccgaagaaggtatgcgcgccaacattcgcgtggctgtgcagtacatcgaagcgtggatctctggcaacggctgtgtgccgatttatggcctgatggaagatgcggcgacggctgaaatttcccgtaccagcatctggcagtggatccatcatcaaaaaacgttgagcaatggcaaaccggtgaccaaagccttgttccgccagatgctgggcgaagagatgaaagtcattgccagcgaactgggcgaagaacgtttctcccaggggcgttttgacgatgccgcacgcttgatggaacagatcaccacttccgatgagttaattgatttcctgaccctgccaggctaccgcctgttagcgtaaaccaccacataactatggagcatctgcacatgaaaacccgtacacaacaaattgaagaattacagaaagagtggactcaaccgcgttgggaaggcattactcgcccatacagtgcggaagatgtggtgaaattacgcggtagtgtcaatcctgaatgcacgctggcgcaactgggcgcagcgaaaatgtggcgtctgctgcacggtgagagcaaaaaaggctacatcaacagcctcggcgcactgactggcggtcaggcgctgcaacaggcgaaagcgggtattgaagcagtctatctgagcggatggcaggtagcggcggacgctaacctggcggccagcatgtatccggatcagagcctctatccggcaaacagcgtgccagctgtggtggagcggatcaacaacaccttccgtcgtgccgatcagatccaatggtccgcgggcattgagccgggcgatccgcgctatgtcgattacttcctgccgatcgttgccgatgcggaagccggttttggcggtgtcctgaatgcctttgaactgatgaaagcgatgattgaagccggtgcagcggcagttcacttcgaagatcagctggcgagtgtgaagaaatgcggtcacatgggcggcaaagttttagtgccaactcaggaagctattcagaaactggtcgcggcgcgtctggcagctgacgtgacgggcgttccaaccctgctggttgcccgtaccgatgctgatgcggcggatctgatcacctccgattgcgacccgtatgacagcgaatttattaccggcgagcgtaccagtgaaggcttcttccgtactcatgcgggcattgagcaagcgatcagccgtggcctggcgtatgcgccatatgctgacctggtctggtgtgaaacctccacgccggatctggaactggcgcgtcgctttgcacaagctatccacgcgaaatatccgggcaaactgctggcttataactgcagcccgagcttcaactggcagaaaaacctcgacgacaaaactattgccagcttccagcagcagctgagcgatatgggctacaagttccagttcatcaccctggcaggtatccacagcatgtggttcaacatgtttgacctggcaaacgcctatgcccagggcgagggtatgaagcactacgttgagaaagtgcagcagccggaatttgccgccgcgaaagatggctataccttcgtatctcaccagcaggaagtgggtacaggttacttcgataaagtgacgactattattcagggcggcacgtctagtgtcaccgcgctgaccggctccactgaagaaagccagttctaagcaacaacaaccgttgctgactgtaggccggataaggcgttcacgccgcatccggcaatcggtgcacgatgcctgatgcgacgcttgcgcgtcttatcatgcctacagccgttgccgaacgtaggctggataaggcgtttacgccgcatccggcaattctctgctcctgatgagggcgctaaatgccgcgtggcctggaattattgattgctcaaaccattttgcaaggcttcgatgctcagtatggtcgattcctcgaagtgacctccggtgcgcagcagcgtttcgaacaggccgactggcatgctgtccagcaggcgatgaaaaaccgtatccatctttacgatcatcacgttggtctggtcgtggagcaactgcgctgcattactaacgaccaaagtacggacgcggcatttttactacgtgttaaagagcattacacccggctgttgccggattacccgcgcttcgagattgcggagagcttttttaactccgtgtactgtcggttatttgaccaccgcagccttactcccgagcggctttttatctttagctctcagccagagcgccgctttcgtaccattccccgcccgctggcgaaagactttcaccccgatcacggctgggaatctctactgatgcgcgttatcagcgacctaccgctgcgcctgcgctggcagaataaaagccgtgacatccattacattattcgccatctgacggaaacgctggggacagacaacctcgcggaaagtcatttacaggtggcgaacgaactgttttaccgcaataaagccgcctggctggtaggcaaactgatcacaccttccggcacattgccatttttgctgccgatccaccagacggacgacggcgagttatttattgatacctgcctgacgacgaccgccgaagcgagcattgtttttggctttgcgcgttcttattttatggtttatgcgccgctgcccgcagcgctggtcgagtggctacgggaaattctgccaggtaaaaccaccgctgaattgtatatggctatcggctgccagaagcacgccaaaaccgaaagctaccgcgaatatctcgtttatctacagggctgtaatgagcagttcattgaagcgccgggtattcgtggaatggtgatgttggtgtttacgctgccgggctttgatcgggtattcaaagtcatcaaagacaggttcgcgccgcagaaagagatgtctgccgctcacgttcgtgcctgctatcaactggtgaaagagcacgatcgcgtgggccgaatggcggacacccaggagtttgaaaactttgtgctggagaagcggcatatttccccggcattaatggaattactgcttcaggaagcagcggaaaaaatcaccgatctcggcgaacaaattgtgattcgccatctttatattgagcggcggatggtgccgctcaatatctggctggaacaagtggaaggtcagcagttgcgcgacgccattgaagaatacggtaacgctattcgccagcttgccgctgctaacattttccctggcgacatgctgtttaaaaacttcggtgtcacccgtcacgggcgtgtggttttttatgattacgatgaaatttgctacatgacggaagtgaatttccgcgacatcccgccgccgcgctatccggaagacgaacttgccagcgaaccgtggtacagcgtcagcccgggcgatgttttcccggaagagtttcgccactggctatgcgccgacccgcgtattggtccgctgtttgaagagatgcacgccgacctgttccgcgctgattactggcgcgcactacaaaaccgcatacgtgaagggcatgtggaagatgtttatgcgtatcggcgcaggcaaagatttagcgtacggtatggggagatgcttttttgagtaaagcttccatataatttttctccgcaatgtatcgagggttatccgtaaagccaaagctttcagccatcttatttaatgtattaaggattaattcagcaataacccggtgaccaaattcaaaagccaactcaaaggcagagtatttttgtggggctttgtgttgccaaaaatccataatatcttcagcggtaaatccaaacaggcgtgcatggtcagataaagcaagataaaccgtctctacaacattttgttgtttatgctgtatcgcactaaacaaaccgggatattcattagaattatttgccaggaggaggggcttcatattttttttatcgaatttaaacgtattaaacagagtgggtaatgcgttaaaaatagtattaataacgttcatgtgtccgcgctgcatggccataaacaaacccgtgtcgcgcgcaagacttttagcggtcagaagatctacaatatcggaagcactaatgttaatttcctgggctaggctgggcaatgcttcaagaataactttcacgatatcgctatgtccattttgcatcgccagatatagtcctgggcaaccataaaaatcctttgccttcaggagatcgagtacctgttctttagtcaaatgacatgtgcgaattaacaaaggtaacgcgttcaaaacaattttcagcatgtcggcatcaccattcgccataacatggtataaaacatggctggacgttctatttttggcactcaggaatttatacacttgttcgttatctaaatgatgtgttgcggccagtttaggtaaggcgttcagaatgctggttacaacatttttatccttacgacttatcgctaaaaataatccagaaaaaccatttttatcttttgcctccagaatatgcatgagattttttttgctgagtaatccttcatatcctgtttcactcaaactattgaaaatagtctcaacgatatccgcattaccataatttatagccaaatataaacctggcaggttaatactattataggcagtcaacatttctgttctatgtagttctggcattttctggagttgaatcatcagttgcgtaagttggtgattctgaccaattgccattagcaaattcatcgttgcaggacttaatggaggggttatttcatccacagatccttttaacatcaatagctgttctttcggaagtgctggaattattgcaacagattgattaataacatgatcattactccatttcaggaggctataatctacattcataaaatccatcagagaatagtgtttaatattctctttgctttcgctcataattcttattttatcgttagttacattaggatcataaacgctaaccacgtaatgggtacatccttcagttgtgttctttattcttagccggaccgtcaaagcatggttatccaccagtaatatggctgccataacactgatgccattactttccatcttgtcaaaatatgctttcataactagcccgaaatcaccgcaggcagcaacgcaacgcccctcaggacggctggaaaccaacgccaaagtctggtttttgcattttttgttgaagtgcgtgagaaatttttcagcactagagtaatcatcttgatggggtttgtaatcaacattctgataaatatcattaatatattgtgcagcaatgtgtcggcatactatacggttttggggtcgccccggaaaataacattgaccattaagtttaattcttgggaattctttttcttttctatcactttttaggtttaattcttgtttatcaagagtgtcactgcgttgaggtaaaatttccattaggtatttttcaaatattggggcaatggtttgagtaagtgtcgtgttttcgtttttattaattatcgtaatttctttcttatcagcttgtaagacggacgtggaaaatttaatgacaaaatccttgttgctaaagatatgacgaccattttgtctacagttctcactgaagctttttaatagaggcgtcgccagctccttgccagaaaatttatcctcgagttctttataaaacaattcactcagggtttggtgttcatttgtctgggctgtattattaatatttgcagagaaagaactacgaggaatacgagtaatcatttaaatatctcattgtttattgatgtcttgaattttaactatcagaacagtgaaaaaatttaatatgattacaactaaagaaatatcataaatcgctcaatctcataatgcagccgtaaaagtttcggtggaatgagatcttgcgattttgttaataattaagtggtttgatgtttaaaaataatgctgagttaataaaagtgtgtgaagtgtatgacattaagttattttggcgtcaatgcgattaacagacacccttattctattgccactcaggtatgatgggcagaatattgcctctgcccgccagaaaaagtcagcgcattccaccgtacgccagcgtcacttccttcgccgctttaatcaccatcgcgccaaactcggtcacgcggtcatcggtaatacgactaatcggtccggaaatagaaattgcggcaaacggttcacggtgctcatcgaaaatacacgctgcaaggcaacgtagccccagtgcatgttcctcatcgtcaaaactataaccccgtttgcgcgtttgggcgagatcttcttttaaatgcacaggagacaccagcgttgcgtgggtataggcatgtaaccctttgcggtgcagcagcttcgtcacctgttcttcgctcagttgggctaaaaaggctttacccgcaccggaagcgtgcatcggcaatttaccgccgataggcgcggacattcgcatcagatgcgtacactgtacctggtcgataataatcgcttcgtgatcgctttgatcaagcaccgccatattgaccgtttcgccagactcttccattagattgcgcaggatagggtgaacaatcgctaacaaattacggctctggagaaagctgctgccgaccataaaggcatgtgcgccgattgcccaatgtcccagttcgccaacctgacgcacgaaaccctgctgttgcatcgtggttagcaggcggtgggtcgtggaattgggtaacccggcttgttgcgccagttccgtgagtgccacactgccattggattcggcaatccactccagtaatttcaggccacgcgttaaagactgaacctgtccagtcgctggtgcggtggcaacggcgggttttctgccgcgtttcgcgggaatgggtgcgaccatgacagtctcttttttctgtatcgtggaaatcattttcatttttattgttagctaatgcaatagttactgaactgatccgatgagttaatgttgaacaaatctcatgttgcgtggtggtcgcttttaccacagatgcgtttatgccagtatggtttgttgaatttttattaaatctgggttgagcgtgtcgggagcaagtgtgagcagcaaagtggaacaactgcgtgcgcagttaaatgaacgtattctggtgctggacggcggtatgggcaccatgatccagagttatcgactgaacgaagccgattttcgtggtgaacgctttgccgactggccatgcgacctcaaaggcaacaacgacctgctggtactcagtaaaccggaagtgatcgccgctatccacaacgcctactttgaagcgggcgcggatatcatcgaaaccaacaccttcaactccacgaccattgcgatggcggattaccagatggaatccctgagcgcggaaatcaactttgcggcggcgaaactggcgcgagcttgtgctgacgagtggaccgcgcgcacgccagagaaaccgcgctacgttgccggtgttctcggcccgaccaaccgcacggcgtctatttctccggacgtcaacgatccggcatttcgtaatatcacttttgacgggctggtggcggcttatcgagagtccaccaaagcgctggtggaaggtggcgcggatctgatcctgattgaaaccgttttcgacacccttaacgccaaagcggcggtatttgcggtgaaaacggagtttgaagcgctgggcgttgagctgccgattatgatctccggcaccatcaccgacgcctccgggcgcacgctctccgggcagaccaccgaagcattttacaacagtttgcgccacgccgaagctctgacctttggcctgaactgtgcgctggggcccgatgaactgcgccagtacgtgcaggagctgagtcggattgcggaatgctacgtcaccgcgcacccgaacgccgggctacccaacgcctttggtgagtacgatctcgacgccgacacgatggcaaaacagatacgtgaatgggcgcaagcgggttttctcaatatcgtcggcggctgctgtggcaccacgccacaacatattgcagcgatgagtcgtgcagtagaaggattagcgccgcgcaaactgccggaaattcccgtagcctgccgtttgtccggcctggagccgctgaacattggcgaagatagcctgtttgtgaacgtgggtgaacgcaccaacgtcaccggttccgctaagttcaagcgcctgatcaaagaagagaaatacagcgaggcgctggatgtcgcgcgtcaacaggtggaaaacggcgcgcagattatcgatatcaacatggatgaagggatgctcgatgccgaagcggcgatggtgcgttttctcaatctgattgccggtgaaccggatatcgctcgcgtgccgattatgatcgactccagtaaatgggacgtcattgaaaaaggtctgaagtgtatccagggcaaaggcattgttaactctatcagcatgaaagagggcgtcgatgcctttatccatcacgcgaaattgttgcgtcgctacggtgcggcagtggtggtaatggcctttgacgaacagggacaggccgatactcgcgcacggaaaatcgagatttgccgtcgggcgtacaaaatcctcaccgaagaggttggcttcccgccagaagatatcatcttcgacccaaacatcttcgcggtcgcaactggcattgaagagcacaacaactacgcgcaggactttatcggcgcgtgtgaagacatcaaacgcgaactgccgcacgcgctgatttccggcggcgtatctaacgtttctttcagcttccgtggcaacgatccggtgcgcgaagccattcacgcagtgttcctctactacgctattcgcaatggcatggatatggggatcgtcaacgccgggcaactggcgatttacgacgacctacccgctgaactgcgcgacgcggtggaagatgtgattcttaatcgtcgcgacgatggcaccgagcgtttactggagcttgccgagaaatatcgcggcagcaaaaccgacgacaccgccaacgcccagcaggcggagtggcgcagctgggaagtgaataaacgtctggaatacagcctggtcaaaggcattaccgagtttatcgagcaggataccgaagaagcccgccagcaggctacgcgcccgattgaagtgattgaaggcccgttgatggacggcatgaatgtggtcggcgacctgtttggcgaagggaaaatgttcctgccacaggtggtcaaaagcgcgcgcgtcatgaaacaggcggtggcctacctcgaaccgtttattgaagccagcaaagagcagggcaaaaccaacggcaagatggtgatcgccaccgtgaagggcgacgtccacgacatcggtaaaaatatcgttggtgtggtgctgcaatgtaacaactacgaaattgtcgatctcggcgttatggtgcctgcggaaaaaattctccgtaccgctaaagaagtgaatgctgatctgattggccttagcgggcttatcacgccgagcctggacgagatggttaacgtggcgaaagagatggagcgtcagggcttcactattccgttactgattggcggcgcgacgaccagtaaagcgcacacggcggtgaaaatcgagcagaactacagcggcccgacggtgtatgtgcagaatgccagccgtaccgttggtgtggtggcggcgctgctttccgatacccagcgcgatgattttgtcgctcgtacccgcaaggagtacgaaaccgtacgtattcagcacgggcgcaagaaaccgcgcacaccaccggtcacgctggaagcggcgcgcgataacgatttcgcttttgactggcaggcttacacgccgccggtggcgcaccgtctcggcgtgcaggaagtcgaagccagcatcgaaacgctgcgtaattacatcgactggacaccgttctttatgacctggagcctggccgggaagtatccgcgcattctggaagatgaagtggtgggcgttgaggcgcagcggctgtttaaagacgccaacgacatgctggataaattaagcgccgagaaaacgctgaatccgcgtggcgtggtgggcctgttcccggcaaaccgtgtgggcgatgacattgaaatctaccgtgacgaaacgcgtacccatgtgatcaacgtcagccaccatctgcgtcaacagaccgaaaaaacaggcttcgctaactactgtctcgctgacttcgttgcgccgaagctttctggtaaagcagattacatcggcgcatttgccgtgactggcgggctggaagaggacgcactggctgatgcctttgaagcgcagcacgatgattacaacaaaatcatggtgaaagcgcttgccgaccgtttagccgaagcctttgcggagtatctccatgagcgtgtgcgtaaagtctactggggctatgcgccgaacgagaacctcagcaacgaagagctgatccgcgaaaactaccagggcatccgtccggcaccgggctatccggcctgcccggaacatacggaaaaagccaccatctgggagctgctggaagtggaaaaacacactggcatgaaactcacagaatctttcgccatgtggcccggtgcaagcgttagcggttggtacttcagccacccggacagcaagtactacgctgtagcacaaattcagcgcgatcaggttgaagattatgcccgccgtaaaggtatgagcgttaccgaagttgagcgctggctggcaccgaatctggggtatgacgcggactgattcacaaatctgtcacttttccttacaacaaacagggcgctcaatgagtgccctgtctctttattaatatgaaacacttatactggaaacaggctggaataatcttagccggaaaaacgaatgtcaaaaggcacagtaaagatgccagtcagcgtgtttccggtcctttggtcattcaattgcttcaggaacatataacgataaggagaacctgaactcgtgttaacgctgcttcacctgctttctgccgtcgccctgctggtctgggggactcatattgttcgaaccggcgtaatgcgcgtcttcggcgcgcgtttgcgtactgtccttagccggagcgtcgaaaaaaagccgctcgccttttgcgcggggatcggcgttaccgcactggtacagagcagtaatgccaccaccatgctggtgaccagctttgtcgctcaggatctggtagccctcgcaccggctctggtcattgtgctgggtgcagatgtcgggacggcgctaatggcgcgtattctcaccttcgacttatcctggctgagtccgttacttatttttatcggcgtgatttttttcctcggacgcaaacagagtcgcgccgggcaactgggccgcgtcggtattggtcttgggctgattttgctagcgctggagttgattgtgcaggccgtaacgccgatcacccaggcaaacggcgttcaggtgatctttgccagcctgaccggcgatattctgctggatgcgctgattggcgcgatgttcgccattatcagctactccagccttgctgctgtactgctgaccgcgactctgaccgccgcaggcattatctccttccccgtggcgctctgtctggtgattggtgctaacctcggttccggtctgctggcaatgctcaacaacagtgccgccaatgccgcagcccgccgtgtcgcgctgggtagtctgctgtttaagctggtgggtagcctgattatcctgccgtttgtccatttgctggcagagacaatggggaagttgagtttgccaaaagcggaactggtgatctatttccacgtcttctacaaccttgtacgttgcctggtcatgctgccatttgttgacccgatggcacggttttgcaaaacgattattcgcgatgaaccggaactggatacccagctacggcctaaacatctggatgtcagcgcgctggatacgcccacgcttgctctggcgaacgccgcgcgcgaaaccctgcgcattggcgacgccatggaacagatgatggaagggttgaataaagtgatgcacggtgagccacggcaggagaaagagctgcgtaagctggcagatgatatcaacgttctctacaccgccattaagctgtatctggcgcggatgccaaaagaagagctggcggaggaagagagccgccgctgggcagagatcatcgaaatgagcctcaaccttgaacaggcctccgatatcgtcgagcgcatgggcagcgaaattgctgacaaaagtctggcagcacggcgggcatttagccttgatgggttgaaggaactggatgcgctctatgagcaattgctcagtaatttaaagctggcaatgagcgtgttcttctctggcgatgtcaccagcgctcgtcgtttgcgtcgcagcaaacatcgttttcgcattcttaatcgccgctattcccacgcccacgtcgatcgcctgcatcagcaaaacgtgcagagcattgaaaccagtagcctacatttaggcttactgggagatatgcagcgcctgaacagcctgttttgtagcgtggcttacagtgtgctggaacagccggatgaagatgaaggacgggacgagtattaatattgtgaatcctgtaggcctgataagacgcgtcaagcgtcgcatcaggcactatgaacaagatgccggatcatgcatccggcaattcacttaaaaacggtgaccagcttccagcggaaccgcttcttcaccagccttaaacacataagtggtgttcgggccacccagcgtagcgtgacctttactcactgtgatccagttaccttccggtagaccaataatcgtcagttctggcgcgacgaccagcagttcgcgaatacgctgctcacgggtttcacctttatggccttccggcagcgcgttggtgaagtgcgggttgatttgcagcgggaacagatttagcgcatcgaaaccttgcggatcgacaatcggcatatcgttggtggtacgaatagttgggcaagcaaggttagcgcctgcgctccagccaatatacagagcgccacgtttaaccacgtcagtaattggtgccagcagcccgcgctcgcggcactgtttcagcaactggaaagtattcccgccgccgacaatcacgatctcagcattttcaatcgcggcaacgggatcgacaacgctatgaataccggtgacagaaacacccagcggagcgagaaccgcagccgttttcgctgtgtaatcatcccaggtctgcgttacgccagcgaaagggataaacaccgcactgcggcgaccctgcaactgttcagcaattagcggcagtgcatgttccagccaggctttacccggcagcgtgctgttactcaataaaagcagttccattacttctccggttagtaagaaatcacgggaggcatgctaccactgcgaatttaaccacttactgacatggctcacgatgtcgcacattgcttctggaaagtgatttgagcaggtaacgaattcaagccaatggaaataacaaatagttcgctcatgactattttttatcaacccaaaggtacggtatattccgttttttacaggagaatttatgctgcccgacagtagtgtccgtttaaataaatacatcagcgaaagcggaatttgcagtcgccgcgaagcggatcgctatatcgagcaaggcaatgtgttccttaatggcaagcgagccaccattggcgatcaggtgaaacccggcgacgttgtgaaagtaaacggtcagttgattgaacctcgggaagccgaagatttggtacttatcgccctgaacaagcccgttggtattgtaagcaccaccgaagatggcgagcgcgataacattgtcgatttcgttaaccacagcaaacgcgtgttcccgattggccgcctggataaagactcccaggggctgattttcctcaccaatcacggcgatctggtgaataagatcctgcgtgctggcaatgatcatgagaaagagtatctggtgacggtcgataaaccgattaccgaggagtttattcgcggcatgagtgcgggggtgccaatcctcgggacagtgaccaaaaagtgcaaagttaaaaaagaagcgccgtttgtcttccgcattaccctggtgcaggggctgaaccgtcagatccggcgcatgtgcgagcatttcggctatgaagtgaaaaagctggaacgcacgcgcatcatgaacgttagcttaagcggcattccgctgggggaatggcgcgatttaaccgacgatgagttaatcgacctctttaagctcattgaaaattcctcttccgaggtaaaacctaaagcgaaggccaaaccgaaaacagcgggcatcaaacgtccagtcgttaagatggaaaaaacggcggaaaaaggcggtcgcccggcgtccaacggtaagcgttttaccagcccggggcgtaaaaagaaggggcgctgattaacgcctcagactgatgaaaacggcccaaaagtgcccggacagtcccctcgccccttcgggaaaagggttagggtgaggggaaaattgtgttcacactgacgagtgaaaatctcaggcgttgattgtggattagcgcctgccgcgcgtgctcgtatttgcactccagctaaaactcgcttcaggatccggtttataagcctgctttttcttcaactggcgggcttttttcgcttcagcctcacgctcaaccattaatttatcgatgtaatctttcttaatgctgttggtttcggagttggtcaatacgcgaccatgcgcaatccgcgcccgatccagcagtgttttaagttcacgctgctcgcgttcagtcatctctttttgggtaatacgggggagtgccatgatggtgccctcagtgagccagagagttcagtgtacgggaattcgtttgcgagcagaactgataatattcattttgccttctcttaactatttatctctttcgataattaattagagatgcagataaaaaaattaaaggcaattattctccgataaagacgctggttaacagagtacaggctcgtttattgatgagcatagtgacaagaaaatcaatacggcccgaaatatagcttccaggccatacagtatttactcaaacaaattactatgcagtttttgcaccacctgctcggcatcttcgccgggcaccaggaagcacaggttatggctggatgcgccataacaaatcatgcgaatgttgaacggttccagtacgccgaatacctctttgccaacgccgcaggctttactcaggtcattgccaatcaacgcgaccagcgccagaccttcttccacctccacccgacacagtgcggaaagctccatcagcagagattgcgtcagcaacgtatcgccagtggaggtactaccggtggtatcaagggttaatgccacgctcacttcactcgtggtgattaagtctacgctaatattatgccgcgcgaggatgccgaaaacttccgcgaggaaaccgcgagaatgcagcatattcaggctgtgcaaagtgagcagagtctgattgcgacgaagcgccagagcgcggaacagcggcggattttcagttttattgcacaccagcgtaccacctgcgcgtgggtctttgctggagccgacaaagaccgggatatcgctgcgtactgcgggtagcaacgttgccggatgcagtacttttgcaccaaaagttgccatctctgccgcttcggcaaacgcgatttcatcaatgcgttttgctgcggaaactacgcgtggatcggtggtgtagatgcccgggacgtcggtccagatatcaacacgagatgcgtgtaaagcctccgccagcaaggctgccgtataatcgctgcctccacggccaagcgtcgttgtacgacctttattttcgctaccgataaatccctgggtgatcactaagccttcattgagacgtgggagcagctgcagcgcggccagttccgccagcgcggctatatctggctctgcacgaccaaatcggtcgttggtacgcatcactttacgtacatcaaaccactgtgcctgaacatcgcgttcgcgcaggatctcaacaaacagcagggtgctcatcagctcgccgtggctgaccagctcatctgtcagcgccggagacgttgccagcgccgccgcttctgccagaacagtaatgttctccagcagacgttcaatctcttcacggataacgttcgggtaacgcagacgttccagaatggcaaactggatgttgcggatagcgtcgagtttttcgaatcgctcgccaggttccagtccttcagctaaagcgaccagcagattagtgataccagcagaagcgctgaggacaactaaacgcacgttggcatcagaaagcacaatatcagcgctgcggttcatggcgtcaaaatcagctacgctggtaccgccaaatttggagacaacaatttcagacataactacctcgtgtcaggggatccattttcagccttggcacaagggaagagcggaagacgggtgggcgcagagcgatacttcgctactattttcacccagaagtgctccaccacttgcgaaacgcccgactgcgaacgcttctggtgacaacccaggggattcagcccctgtagccgatgatgaacgtggccagccgttcaatcacctcggcgatgcaccccctcaggtgttatcacaggactggctcctccaacaccgttacttgggcaacgcgcctcttctggcctgcgctagcgcaggtagtacatttataaataaagggtgagcggggcggttgtcaacgatggggtcatgcggatttttcatccactcctggcggtcagtagttcagctaataaatgcttcactgcgctaagggtttacactcaacattacgctaacggcactaaaaccatcacatttttctgtgactggcgctacaatcttccaaagtcacaattctcaaaatcagaagagtattgctaatgaaaaacatcaatccaacgcagaccgctgcctggcaggcactacagaaacacttcgatgaaatgaaagacgttacgatcgccgatctttttgctaaagacggcgatcgtttttctaagttctccgcaaccttcgacgatcagatgctggtggattactccaaaaaccgcatcactgaagagacgctggcgaaattacaggatctggcgaaagagtgcgatctggcgggcgcgattaagagcatgttctctggcgagaagatcaaccgcactgaaaaccgcgccgtgctgcacgtagcgctgcgtaaccgtagcaataccccgattttggttgatggcaaagacgtaatgccggaagtcaacgcggtgctggagaagatgaaaaccttcagtgaagcgattatttccggtgagtggaaaggttataccggcaaagcaatcactgacgtagtgaacatcgggatcggcggttctgacctcggcccatacatggtgaccgaagctctgcgtccgtacaaaaaccacctgaacatgcactttgtttctaacgtcgatgggactcacatcgcggaagtgctgaaaaaagtaaacccggaaaccacgctgttcttggtagcatctaaaaccttcaccactcaggaaactatgaccaacgcccatagcgcgcgtgactggttcctgaaagcggcaggtgatgaaaaacacgttgcaaaacactttgcggcgctttccaccaatgccaaagccgttggcgagtttggtattgatactgccaacatgttcgagttctgggactgggttggcggccgttactctttgtggagtgcgattggcctgagcattgttctctccatcggctttgataacttcgttgaactgctttccggcgcacacgcgatggacaagcatttctccaccacgcctgccgagaaaaacctgcctgtactgctggcgctgattggcatctggtacaacaatttctttggtgcggaaactgaagcgattctgccgtatgaccagtatatgcaccgtttcgcggcgtacttccagcagggcaatatggagtccaacggtaagtatgttgaccgtaacggtaacgttgtggattaccagactggcccgattatctggggtgaaccaggcactaacggtcagcacgcgttctaccagctgatccaccagggaaccaaaatggtaccgtgcgatttcatcgctccggctatcacccataacccgctctctgatcatcaccagaaactgctgtctaacttcttcgcccagaccgaagcgctggcgtttggtaaatcccgcgaagtggttgagcaggaatatcgtgatcagggtaaagatccggcaacgcttgactacgtggtgccgttcaaagtattcgaaggtaaccgcccgaccaactccatcctgctgcgtgaaatcactccgttcagcctgggtgcgttgattgcgctgtatgagcacaaaatctttactcagggcgtgatcctgaacatcttcaccttcgaccagtggggcgtggaactgggtaaacagctggcgaaccgtattctgccagagctgaaagatgataaagaaatcagcagccacgatagcagcaccaatggtctgattaaccgctataaagcgtggcgcggttaatcatcgtcgatatgtaggccggataaggcgttcacgccgcatccggcaaccgatgcctgatgcgacgcggtcgcgtcttatcaggcctacaggtcgatgccgatatgtacatcgtattcggcaattaatacatagcacgattgattaaataaccttaataacaatgccgacgttatgtcggcatttttttatcagataaatccccttgtctgtaatttaacggaaatcataccgtgaggttaatcctaaaatagatttttaatcgttgtttatttcggaaaatacgcagattaattgcttttgtttttattttaagtttatgatttttattgttatttaaatataagttgaaacttatatttgatattcattccaattatcctaaaacgccatcgctaattccccgcgccgtaattcgcatgctttagttgtgtatactcgatcccgcccgaaatgtttttgggtaaatctccattcattcaatgaagggaaattgttatgaaaaaagttctgtatggcatttttgccatatctgcgcttgcggcgacttctgcgtgggctgcacctgtacaggtgggcgaagcggcagggagcgcagcaacgagcgttagcgcggggagttcctccgcgaccagcgtcagcaccgtaagcagcgcggtgggtgtcgcgcttgcggcaaccggtggcggtgatggttctaataccgggaccaccacaaccacgaccaccagtacccagtaataaagtatgtatccccaaaataattcgagtcattgcatctgtggctagaagtatgaagggattaaccataaccacactccggtgtggttattctgcccctctggagaagagtcgtgaagcgacctgcactcattcttatctgcctgttattacaggcctgtagtgccacgactaaagagctgggcaatagtctgtgggacagtctgttcggcacgccaggcgtacagctgacggatgatgatattcaaaatatgccctacgccagccagtacatgcagcttaatggcgggccgcagttatttgtggtgctggccttcgctgaagacggacaacaaaaatgggtcactcaggatcaggctactctcgttacccaacatggccgtctggtgaagactctgctcggcggcgacaacctgattgaagtgaataaccttgctgccgacccgctgattaaacccgcacaaatcgttgatggcgcaagctggacgcgcacgatgggctggaccgagtaccagcaggtacgctacgccaccgcacgcagtgtcttcaaatgggatggcaccgataccgtcaaagtcggcagcgatgaaaccccggttcgcgtgctggacgaagaagtctccaccgaccaggcgcgctggcataaccgctattggatcgacagcgaagggcaaattcgccagagcgaacagtatctcggcgcggattattttccggtgaaaaccactctcatcaaggcggcaaaacaatgattaaacaaactattgtcgcgttgcttttgagtgtgggagcgagtagcgtcttcgcggcaggaaccgtcaaggtgttcagcaatggcagcagtgaggccaaaacgctaacgggcgcagagcatttaatcgatctggtaggccaaccgcggctggcaaacagctggtggcccggtgcggtgattagcgaagagctggcaacggcggcagcattgcgtcagcagcaggcgttgctgacacggctggcagaacagggcgcagattccagcgccgacgatgccgctgcgattaacgccttacgccagcaaattcaggcgttgaaagtgacgggcaggcaaaaaatcaatcttgatcccgatatcgtccgcgttgccgaacgcggtaacccgccgttgcagggcaactacacgctgtgggtcggaccaccgccgtccacggtcacgttgttcgggcttatcagccgtcctggcaagcagccattcactccaggtcgcgacgtggcgagctatctctctgaccagagcctgctcagcggtgcggatcgcagctacgcgtgggtggtttacccggacggacgcacgcaaaaagcgccggtggcttactggaacaagcgtcacgtagagccgatgcccggcagcattatttatgttggcctcgcggactccgtctggagtgagacgcctgatgcccttaacgccgacattcttcagactctgacgcagcggatacctcaataatgaaaaaaagacatctgcttagcttactggcgctgggcattagcacagcttgctacggcgaaacatatcctgcgcccattggtccgagccagagcgatttcggtggcgtaggattattacaaacgcccaccgcgcgtatggcacgggaaggggagttgagtctgaactatcgcgataacgatcagtaccgttattacagtgctagtgtgcaactcttcccgtggctggaaacaacgctgcgctacaccgacgtgcgcacccggcagtacagcagcgtcgaagcgttctctggcgatcaaacgtataaagataaagccttcgatctcaaactgcgtttgtgggaagagagttactggctgccgcaagtggcggttggtgcgcgggatatcggcggtacggggctgtttgatgcggaatatcttgttgccagcaaagcctgggggccgttcgattttacgctcggcctgggctgggggtatttgggcaccagcggtaatgtgaaaaatccgctctgtagtgccagtgataaatattgctatcgcgataacagctacaaacaggcgggatctatcgacggtagccagatgttccacggtcctgccagtctgtttggcggcgtggaataccagacgccctggcaaccgctgcgcctgaaactggagtatgaaggcaataattatcagcaggattttgccgggaagctggagcaaaaaagtaagtttaacgtcggtgcgatttatcgcgttaccgattgggccgacgttaaccttagctatgaacgtggcaacacctttatgtttggcgttacgttgcgcaccaactttaacgatctgcgcccgtcttacaacgataacgcccgcccgcaatatcaaccgcagccgcaggatgccattttgcagcatagcgtggtggcgaatcagttaacgctgttgaaatacaatgccggacttgccgatccacagatccaggcgaaaggcgatacgctgtatgttaccggcgagcaggtgaaatatcgtgatagccgcgaagggatcatccgtgcgaatcggatcgtgatgaacgatctgccggatgggatcaaaacgatccgcattacggaaaatcgccttaacatgccgcaggtgacgacggaaaccgatgtcgccagcctgaaaaatcatctcgccggagagccgttgggccacgaaacgacgctggcgcaaaaacgcgtcgagccagtggttccgcagtccaccgagcagggctggtatatcgacaaaagtcgctttgatttccatatcgatccggtgctgaaccagagcgtcggtggcccggaaaacttttacatgtatcagctgggcgtgatgggaacggcagatttgtggctgacggaccatctgctgaccaccggcagcctgtttgcaaatcttgccaacaactacgacaagtttaactacactaatcctccgcaggacagccacttaccgcgcgtgcgtacccatgtgcgcgagtatgtgcagaacgatgtctatgtgaataacctgcaagccaactacttccagcatctgggcaacggcttctacggtcaggtctacggtggttatctcgaaaccatgtttggcggtgcgggggcagaagtgttgtatcgcccgctggacagcaactgggcgtttggtctggatgccaactacgttaaacagcgcgactggcgtagtgcaaaagatatgatgaaattcaccgactacagcgtgaaaaccggacatctgaccgcctactggacgccatctttcgctcaggatgtgttagttaaagccagcgtcgggcagtatctggcaggggataaaggcggcacgctggagatcgccaaacgctttgatagcggcgtggtggtgggtggctatgccacgatcactaatgttagcaaagaggagtacggcgaaggggacttcaccaaaggcgtgtatgtcagcgtaccgttggatctcttcagctctggcccgacacgcagccgtgcggcgattggctggacgccgctgacgcgtgacggtggtcagcaacttgggcgtaagttccagttgtatgacatgaccagcgaccgtagcgtcaatttccgctaagtcatgggaaaggtgccagttttcgcactcactggcaccttcattcttaatggcctgtcgagccatcaggaacgcagttcactcccggtttgcgatctggtgtgtaaaggcgaaaacattctgtcttcctgtccgtcgatatcggttgcaggtctggttgcctgagcgactgggccatcattgggctggagacattgctttgcggtaggtcggctttatcagcagtaccgagcggaccagcataagcaggaagaacagagactgataacatcaaagcagcaaaataaggcttcatttttaccacctttatcaggttacgtttcatttgttccagaggaacattgtcgatttttcgcgcattgctggtggctgggaatcacctgaatgggtgatttttgaattaccggctttggtgcggtttgtcttgccggatgcgccgccaggcgcggcttatccggcctacgggtaggtatatccggctttggtggaggcgcgctccaaatccaggttgaacaaaacatacacaaaaaatatagatctccgtcacatttttgcgttatacaggaagctcgccactgtgaaggaggtactgctatgacgagtctctctcgtccgcgcgtggagtttatctccaccattttgcagaccgtactcaatcttggcctgctgtgcctcggcctgattttggttgtcttcctcggcaaagaaacggtgcatctggctgatgtgctgttcgcgccagaacaaaccagcaaatatgagctggtagaaggactggtggtttactttctctatttcgaatttatcgcgctgattgtgaagtactttcagtccggttttcacttcccgctacgttactttgtctatattgggatcaccgccattgtgcgcttgatcatcgtcgatcataaaagcccactggatgtgttgatctacagcgctgcgatcctgttactggtgatcaccctgtggctgtgtaatagcaaacggctgaagcgggagtaaaaagtcagcacgccgaaatggcgcggcgtgctggacaggaagattacagcgtagcagtttgttgtgttttcttcgtttccggttcccagagcgcttccagctcctcaagggttttacctttggtttccgggacaaatttccacataaacagtgctgccagaacgcccatacaaccgtaaatccagtaggagaaaccgttgtggaaatgggccaccagccaggagtttttgtccatcatcgggaaggtccaggagacgaagtagttcgccagccactgggccgccaccgcgattgccagcgctttaccacgaatagcattcgggaagatttcgctcagcagtacccagcataccggaccccaggacatggcaaaggcggcaacatagaacagcatgctcagtagcgccacaatacccggtgcctgagtgtaaaacgcggtaccgaggctaaacataccgattgccattccgagtgcgccgataatttgcagtggcttacgaccaaatttatccaccgtcataattgccagaacggtgaaggtgaggttgataactccgacaataatggtctgcaacagcgcgatatccgtgctggcccccagcgttttgaacacttccggcgcgtagtacagcaccacattgatgccgacaaattgctggaagatggagagcattacgccgattacaatcacgcccacgccaaacatcagcagacgaccaccggttttgcggccatgatccagggagtgtttaatttcctgtactgcctgagttgcaagcgtgttgcccataattttgcgcaggataccttccgcctgttcttgcttgccgcggctcatcagccagcgaggactttctggcacggtatacagcagcattaagaacagcagtgcagggatacattcgctggcaaacatataacgccagccgtcagtattcagccagctggcatcaccggaacgggcaataaaatagtttacgcagtaaactaaaagttgcccgaaaataatcgcaaactggttaaaagagaccagtttcccgcgaatatgagctggagccagttccgcaatatacattgggctgagcatactggctaaaccaacgccaataccgccaataatgcgataaataacaaattccgggacataacctgccagataaacaggcacagtgttgtccgggtttatagaggtaaaaccaagttctggccaggcagaacctacaccagaaataaaaaacaggacagcagcaatcttaagactatcacgacgaccgaagcggttactgcaataaccaccgagggcaccgccgatgatgcaaccaatcagagcgctggccacgcaaaaccctaacagggagttggcagcggattcacttaagttttgtggagcaacaaagacggtattgagactctcaacagtaccggaaataacggcggtgtcgtagccaaataataaaccacctaatgtagcgactaaggtaatgctaaatatataactggaattatactgggtattcattcagacctgccttagaccattctgatcttttatcagtgcattgatgttggaattgtcaggcagttaaggcaattatcattttttacaatgcgtttacgtaatgtcttttctgtgatcttaattgtgataattatccaaaattgataaaaacaatactattgccgtgactcagagcacgaaagagaattatcgtaagtgggaaaacaaataacgtaaaaataataagctctatgatggaaatattaaccggcgaacgattcagattgcagacgaaagaaaaaaaggcgctccgtggagcgccgaataacagtcacaagttgggataacgtaagttgagggtgcagcggcataacattggcagaacaacatctttaacctttcacaccacctgccgtcaggccgttgaccagccagcgttgagccagcaagaagacgatggtgatcggtaatgcagacatcacggcagcggcggcaaagtcaccccacaggtagttttgcgggttgaggtattgctgcatccccacggccagggtgtagctgtttacgtcacgcagtaacaggctcgcgaccggaacttcagtaatggcagcgataaagctcaggatgaataccaccgccagaatcggtacactcagcggcaacaggacaaggcggaaggcctgccacggtgtcgcaccatccagcgcagcagcttcttccaggctactgtcgatggtttcgaaatagcctttgatggtccagacatgcagcgcaatcccacccagatacgcgaaaattacgccgccgtgagtattcaggccaatgaatggaatgtactcacccagacgatcaaacaacgcatacaacgcgaccagactaagtactgccgggaacatctggaaaatcagcattcctttcagcagcgtcgctttgcctggaaagcgcatacgggcgaaagcgtaggcgcaggtggtggagagcgccacaatgccaatcgcggaaatcccggcgacctttacgctgttccacagccacagcagtaccgggaatggcggtggcgtaatgcgaccatcagcctgttcaacgctaaaacctaacgccagtttccagtgatcccaggagatttgctccgggatcaggctgccggtcgcaaagtttccctgacgcaggctgatagcgacgaccatcagcagcgggaacataatcgctgcgataaaaagtagcagtagcaggtgagtaataaataaacgagctttttggcttttcggttggaccattgccatttttgttatctcccttaatcaaacttcattcgcgtggctttcaggttcactatcgccagcgcacccaccagcaggaagatcagcgtggcaattgctgccgccagaccgaagtcctgacccccgccgccttcaaaagcgatgcggtaggtgtagttaacaagcaggtcggtataaccggctggcgtggtcgtgccaagacgatccgggccgccgttggttaacagttgaatcagcacgaagttgttaaagttaaaggcgaagctggcgatcatcagcggcgtcagcggtttaatcagcagcggcagcgtaatcttaaagaagttctggaacggacctgcgccatccattgcactggcttcatacaaatcgtccggaatcgctttcagcaagcccatgcagaggatcatcatgtacggataacccagccaggtattgacgataattagcatcgtgcgggcggtggtcggatcgctgaaccaggcgggcttcacgccaaacagcgcgctcaacatcatgttgatttcaccgaagctctggttaaacaaccctttgaaaatcaagatactaatgaagcttggcaccgcgtagggcagaatcagcaggacgcgatagaccgctttgccgcgcaacgcttcccactgcaccagacacgccagaaccatgccgaccgccaccgttaaaaagacagtgatcaggctgaacaccacggtccagacgaaaatggcgaggaacggtttctgaatgccttcgtcggtaaagacgcgggtaaagtttttccagccggtggtcacggtgtaaccggggcttagcttttcatcaccccagttgccgtcggcggtaatggactggtaaaagccaatttggttattcggacgatatttcacgccgctctgattattcgtcaacgtgccgtcaccgtcgagtgtgtagagcggctgcgtgccagaaaactggcgcagggagctcatcatcactttgttgccatccggcagaatggcggtaatgtcactcagcgcctgacgattctgggtaatcacgcgcagattcgcgcgttcgccttcgggctgggcggtcgtttctttcagttgcagtttttgctcgccgccaaatttaaaagcgtcggagaggtaatttttgccggtttcgccgtcgctgagcgccagttgccactcatcgcccgccgggtaaagaccaaagttataggttttgcctgcttgccaggagcgatctaacaacacttcctgcgcacgttcaaaagtcagctggttagtgctgctgtagttggtgaaggcaatggcgatggtgcagaccagagggaagaggacgaataatcccattccagccattcccgggtaaacatagcgccaggcgtaggctttacgattggcgaaaatatacagccccgcactactcaatatcagcgtggtaatggcgaacaggtattccccttgtgcgtacattaaaacaacaaggtaacccaccagcaggccgagcagacctagcacactccatttcagcgcgtcgctttgccaccaatgtttctttttaatgacatccatggggttcttcctcattccaggacggataaggctttcacgccttatccgacaacaactgcctgatgcgacgctgacgcgtcttatcaggcctacatacgtttcggttttgtaggccggacaaggcgttcacgccgcatccggcatttcacagcattacttggtgatacgagtctgcgcgtctttcagggcttcatcgacagtctgacgaccgctggcggcgttgatcaccgcagtacgcacggcataccagaaagcggacatctgcgggatgttcggcatgatttcacctttctgggcgttttccatggtggcggcaatacgtggatctttcgccaactcttcctcgtaagacttcagcgctacggcacccagcggtttgtctttattaaccgcttccagaccttcatcagtcagcagatagttttcgaggaactctttcgccagctctttgttcggactggcggcgttaatacctgcgctcagcacgccaacgaacggtttggatggttgacccttgaaggtcggcagtaccgttacaccataattcactttgctggtgtcgatgttggaccatgcccacgggccgttgatggtcatcgctgtttcgcctttattaaaggcagcttctgcgatggagtaatcggtgtctgcattcatgtgtttgtttttaatcaggtcaaccaggaaggtcagacccgctttcgcgccagcgttatccacgcccacgtctttaatgtcgtacttgccgttttcatacttgaacgcataacccccgtcagcagcaatcagcggccaggtgaagtacggttcttgcaggttgaacatcagcgcgctcttacctttcgctttcagttctttatccagcgccgggatctcttcccaggtttttggcgggttcggcagcagatctttgttataaatcaggcttaacgcttcaacagcgatcgggtaagcaatcagcttgccgttgtaacgtacggcatcccaggtaaacggatacagcttgtcctggaacgctttgtccggggtgatttcagccaacaggccagattgagcgtagccaccaaagcggtcgtgtgcccagaagataatgtcagggccatcgccagttgccgcaacctgtgggaatttctcttccagtttatccggatgctcaacggtgactttaattccggtatctttctcgaatttcttaccgacttcagcgagaccgttatagcctttatcgccgttaatccagattaccagtttaccttcttcgattttggcgagagcgctggcggaaaacatcatcgtcgttaatgcggataatgcgaggatgcgtgcacctgtttttattttcataatctatggtccttgttggtgaagtgctcgtgaaaacacctaaacggactctagtttctttatacggcaacctctttccatcctccttgcccctacgccccaccgtcgctttgtgtgatctctgttacagaattggcggtaatgtggagatgcgcacataaaatcgccacgatttttgcaagcaacatcacgaaattccttacatgacctcggtttagttcacagaagccgtgttctcatcctcccgcttcctcccccataaaaaagccagggggtggaggatttaagccatctcctgatgacgcatagtcagcccatcatgaatgttgctgtcgatgacaggttgttacaaagggagaagggcatggcgagcgtacagctgcaaaatgtaacgaaagcctggggcgaggtcgtggtaagcaaagatatcaatctcgatatccatgaaggtgaattcgtggtgtttgtcggaccgtctggctgcggtaaaagcactttactgcgcatgattgccgggcttgagacgatcaccagcggcgacctgttcatcggtgagaaacggatgaatgacactccgccagcagaacgcggcgttggtatggtgtttcagtcttacgcgctctatccccacctgagtgtagcagaaaacatgagttttggcctgaaactggctggcgcaaaaaaagaggtgattaaccaacgcgttaaccaggtggcggaagtgctacaactggcgcatttgctggatcgcaaaccgaaagcgctctccggtggtcagcgtcagcgtgtggcgattggccgtacgctggtggccgagccaagcgtatttttgctcgatgaaccgctctccaacctcgatgctgcactgcgtgtgcaaatgcgtatcgaaatctcccgtctgcataaacgcctgggccgcacaatgatttacgtcacccacgatcaggtcgaagcgatgacgctggccgacaaaatcgtggtgctggacgccggtcgcgtggcgcaggttgggaaaccgctggagctgtaccactatccggcagaccgttttgtcgccggatttatcggtagcccaaagatgaacttcctgccggtaaaagtgaccgccaccgcaatcgatcaagtgcaggtggagctgccgatgccaaatcgtcagcaagtctggctgccagttgaaagccgtgatgtccaggttggagccaatatgagcctgggtattcgcccggaacatctactgccgagtgatatcgctgacgtcatccttgagggtgaagttcaggtcgtcgagcaactcggcaacgaaactcaaatccatatccagatcccttccattcgtcaaaacctggtgtaccgccagaacgacgtggtgttggtagaagaaggtgccacattcgctatcggcctgccgccagagcgttgccatctgttccgtgaggatggcactgcatgtcgtcgactgcataaggagccgggcgtttaagcaccccacaaaacacacaaagcctgtcacaggtgatgtgaaaaaagaaaagcaatgactcaggagatagaatgatgattactctgcgcaaacttcctctggcggttgccgtcgcagcgggcgtaatgtctgctcaggcaatggctgttgatttccacggctatgcacgttccggtattggttggacaggtagcggcggtgaacaacagtgtttccagactaccggtgctcaaagtaaataccgtcttggcaacgaatgtgaaacttatgctgaattaaaattgggtcaggaagtgtggaaagagggcgataagagcttctatttcgacactaacgtggcctattccgtcgcacaacagaatgactgggaagctaccgatccggccttccgtgaagcaaacgtgcagggtaaaaacctgatcgaatggctgccaggctccaccatctgggcaggtaagcgcttctaccaacgtcatgacgttcatatgatcgacttctactactgggatatttctggtcctggtgccggtctggaaaacatcgatgttggcttcggtaaactctctctggcagcaacccgctcctctgaagctggtggttcttcctctttcgccagcaacaatatttatgactataccaacgaaaccgcgaacgacgttttcgatgtgcgtttagcgcagatggaaatcaacccgggcggcacattagaactgggtgtcgactacggtcgtgccaacttgcgtgataactatcgtctggttgatggcgcaagcaaagacggctggttattcactgctgaacatactcagagtgtcctgaagggctttaacaagtttgttgttcagtacgctactgacagcatgaccagccagggtaaagggctgagccagggttctggcgttgcatttgataacgaaaaatttgcctacaatatcaacaacaacggtcacatgctgcgtatcctcgaccacggtgcgatctccatgggcgacaactgggacatgatgtacgtgggtatgtaccaggatatcaactgggataacgacaacggcaccaagtggtggaccgtcggtattcgcccgatgtacaagtggacgccaatcatgagcaccgtgatggaaatcggctacgacaacgtcgaatcccagcgcaccggcgacaagaacaatcagtacaaaattaccctcgcacaacaatggcaggctggcgacagcatctggagtcgcccggctattcgtgtcttcgcaacctacgccaagtgggatgagaaatggggttacgactacaccggtaacgctgataacaacgcgaacttcggcaaagccgttcctgctgatttcaacggcggcagcttcggtcgtggcgacagcgacgagtggaccttcggtgcccagatggaaatctggtggtaatagcaaaacctgggccggataaggcgtttacgccgcattcggcaaccaacgcctgatgcgacgcttgcgcgtcttatcaggcctacaacggctgtcaaatgtaggccggataaggcgtttacgccgcatccggcataaaaacaggttgtcattatctgaaaggggcgaaagcccctctgattatcgggtttagcgcgctattgcctggctaccgctgagctccagattttgaggtgaaaacaatgaaaatgaataaaagtctcatcgtcctctgtttaagtgcagggttactggcaagcgcgcctggaattagccttgccgatgttaactacgtaccgcaaaacaccagcgacgcgccagccattccatctgctgcgctgcaacaactcacctggacaccggtcgatcaatctaaaacccagaccacccaactggcgaccggcggccaacaactgaacgttcccggcatcagtggtccggttgctgcgtacagcgtcccggcaaacattggcgaactgaccctgacgctgaccagcgaagtgaacaaacaaaccagcgtttttgcgccgaacgtgctgattcttgatcagaacatgaccccaagtgccttcttccccagcagttatttcacctaccaggaaccaggcgtgatgagtgcagatcggctggaaggcgttatgcgcctgacaccggcgttggggcagcaaaaactttatgttctggtctttaccacggaaaaagatctccagcagacgacccaactgctcgacccggctaaagcctatgccaagggcgtcggtaacagcatcccggatatccccgatccggttgctcgtcataccaccgatggcttactgaaactgaaagtgaaaacgaactccagctccagcgtgttggtaggacctttatttggttcttccgctccagctccggttacggtaggtaacacggcggcaccagctgtggctgcacccgctccggcaccggtgaagaaaagcgagccgatgctcaacgacacggaaagttattttaataccgcgatcaaaaacgctgtcgcgaaaggtgatgttgataaggcgttaaaactgcttgatgaagctgaacgcctgggaagcacatctgcccgttccacctttatcagcagtgtaaaaggcaaggggtaattacgccccacagtgctgattttgcaacaactggtgcgtctcctggcgcacctttttttatgcttccttcctgggatatgagcgattttttatagtaactcacttcttcttcactaagaatatccattatctcaatgccttatcagagattcttttcctttcgccggtagtgtctggacattcaggctacttttccaggttattttatttctgttatgcagaggttttatgataagtcatatcctaaattctggcggcaataactctttgatgaaacatgatgtggtgcaaggaaataatatagtagatcttgatttactacgtaatttaaatggggtgccaggtttaaacagagataactttatttatatcagcaatattttttcaaatataaaacaacggaacgaaaaaatcatgcaataaatatgtttcgtgaagtctcaatcagtaatgatactataagtgtaaaattctacagaaatgaaaaaaattgaatgcgcttgcaattttctgatggataaagatgcgcaggggtatatcgacctgtctgatttggatttaacaagttgtcattttaaaggtgacgttataagcaaggtgtcttttttaagtagtaatctacaacatgtaacattcgaatgtaaagaaattggggattgcaattttactactgcaatagttgataatgtcatatttagatgtcgacgtttacacaatgtgatttttatcaaagcgagtggtgaatgtgtcgatttcagcaaaaatattcttgatacagttgacttcagccagagtcaacttggtcatagtaattttcgcgaatgtcagattagaaatagtaacttcgataattgttatctttacgctagccacttcaccagagcagagtttctgtctgccaaagaaataagttttattaaaagcaatttgacagctgttatgtttgattatgtgcgaatgagcacagggaattttaaagattgcattacagaacaattggaattaactattgattatagtgatatattttggaatgaagatctcgatggttatatcaataacattataaaaatgattgatacattgccagataatgcaatgatattgaaatccgttctggccgtaaaactggtgatgcaattaaaaatacttaatattgttaataaaaactttattgagaatatgaagaaaatatttagccattgtccttatataaaagatcccattatacgcagttatatccattctgatgaagataacaagttcgatgattttatgcgtcaacatcgattcagtgaggtgaatttcgatacccaacagatgatcgattttattaacagatttaatacgaataaatggctaattgataaaaataacaatttttttatccaacttatcgatcaggccttacgaagtacggatgatatgatcaaagcaaatgtttggcatctttataaagagtggattcgtagtgatgatgttagtcctatatttatagaaactgaagataatttaagaacctttaacacgaatgaattaacacgaaacgataatatctttatcctgttctccagtgtcgatgatgggccagttatggtggtaagctcccagcgcttacatgatatgttgaatcctacaaaagataccaattggaattccacgtatatctacaaatccagacatgagatgttgcctgttaatcttactcaggaaacacttttcagctccaaatctcatggtaaatatgcgcttttccccatttttactgcgagttggcgagctcatcgtataatgaataagggtgtttaagtaaaggaaaacatcaccgttcctggcatcctggacggtgatgcccctacggttgccctcgccagcacgggcatcggtaaagcgtaaggttcaacatcgttttaccacttcatgcgattgttgcgtttttgttgcgtattagatcacttaatttgctttacatctcccgtaaacacttttctgcgatacaatgcctttacgttatgtaacggagagttcggcatgagtcaccccgcgttaacgcaactgcgtgcgctgcgctattgtaaagagatccctgccctggatccgcaactgctcgactggctgttgctggaggattccatgacaaaacgttttgaacagcagggaaaaacggtaagcgtgacgatgatccgcgaagggtttgtcgagcagaatgaaatccccgaagaactgccgctgctgccgaaagagtctcgttactggttacgtgaaattttgttatgtgccgatggtgaaccgtggcttgccggtcgtaccgtcgttcctgtgagtacgttaagcgggccggagctggcgttacaaaaattgggtaaaacgccgttaggacgctatctgttcacaagtagcacattaacccgggactttattgagataggccgtgatgccgggctgtgggggcgacgttcccgcctgcgattaagcggtaaaccgctgttgctaacagaactgtttttaccggcgagtccgttgtactaagaggaaaaaaatatggagtggagtctgacgcagaataagctgctggcgtttcatcgcttaatgcgtacggataagccaattggcgcgttactgctgctctggccaacattatgggcgttgtgggtggcgacaccgggcgttccccagctctggatcctggcggtgtttgtcgcgggtgtctggctgatgcgcgctgccggatgtgtggtgaatgattatgctgaccgcaagtttgatggtcatgttaagcgcacggcgaaccgaccacttcccagcggcgcggtaacagagaaagaggcgcgcgcgctgtttgtcgtgctggtactgattagctttttactggtgctgacgctgaatacgatgaccattctgttgagcattgccgcgctagcgctggcgtgggtgtacccgtttatgaagcggtatacccatctaccgcaagtggtgctgggcgcggcgtttggctggagcattccaatggcttttgccgctgtgagtgagagcgtgccattgagttgctggttaatgttcctcgccaatattctctgggcggtggcttacgacacgcagtatgcgatggttgaccgcgatgatgatgtgaagattggcattaaatccacggcaatcctgttcggccaatacgataaattgattattggtattttgcagattggcgtactggcactgatggcgatcatcggtgagttaaatggcttaggctggggatattactggagtattctggtggctggcgcgctgtttgtttatcaacaaaaactgattgccaaccgcgagcgtgaagcctgctttaaagcatttatgaataataactatgttggtctggtactatttttagggctggcaatgagttactggcatttctgatgatgtaaaaaagccggatgatcatccggctttcttctgggttgcctgatgcgcggcgcttctcaggcctacacaacacatcgcaatttattgaatttgcagattatggaaggccggataaggcgttttcgccgcatccggcaattctctctgattacccttcgccctgcgtcgcactctcaatcgtcaaacgcacgtcacttgtaatcaactccgccagcaactgataaaccttcatcgtttctgccggttcggcatcgccgctatcgctgatatacccttcatcacgcagtgtcagcaccagagaactgaacaccgccttgtcgaagaactccggcgcgttgatgccgtgcagcacggagagacgttgcgcgacggtgcggctctctttctccagcgtaccgcggttgatgctcgggttggcactcaacaaccagaaggtgatggcataacgttgcagcgtttcgcgcgcgcctgcggccagcagctgtagcgtgcgagaatgcgccgggttgatatgcaactcatcatcttgcagggtaatcagcccctgacgttgcatctcatttgccagcgcatcaataacgtccggcaactcgtcgcgatcccagcgcaggaacagctccgctttcagcattgggtaaagcacattgacgtgctccatcaatacgtcgcgggagatgtggcgatgctgggtgacgattgccgccatcaggctaggcagcaccaacatatgcgcaatgttgttgcgatagtaggtcatcagcaccgcttgctcgcgcggcagaatgatgatgtcgccgattgtgtctttctcgacttcaaacttgttcatttgcagcgcgtgatcgataagctcgctggcgctggcactaggaacggtagagtccgtggagtagggcacgttgcgcatcagatccaggtagcagttgagttgctcggttaactgctcgcgggtgagactgcgctgacgacttgccagtagcgcagtacagcacaggttcatggcgtttgccgcgcctgcgttgttaatgcgtaccatcagatcggcagcaatattattgaccgtcggcgttaaccatgccggacgcaccgcttcgatgggatcgatagattcacgccagtcaggtacatgctggttaaggtaggtcatcaacggcattggttcaccgaagttgacgtaaccctgaccgagattacgcagcttgcttaaaccgcgcagcatctgcggcaggctctctttctctttcgtcgcgccgcgcagttctttggcgtaagtacccacttccatgacgtgctcataaccgatatagatcggaatcagcgtaatcggacgcgtgccgccacgcagcatcgcctgaatggtcatgctcagcgtaccagttttcggatccagcaaacgccccgtacgggaacgaccgccttccacgaagtactcgacggaataaccacggctgaacagttcgccgagatactcccggaaaacggtggaataaagtttattgcctttaaacgtacggcgaataaagaacgcccccagacggcggaaaatcggcccggcaggccagaaattcaggttgatcccggcggcgatatgcggcggcaccagcccctggtgatacagcacgtaagaaagcagcaggtagtccatgtgactgcggtggcaaggcacatataccagctcatgaccgtcgtgggccagctggcgaacgcgctcagcgttatggacgttgatgccctggtaaagtcggttccaggtgaagcccagaatacggtcagtcaggcgaatcatctcgtaagagaaattcgccgcaatctcttccatcagtgcaatcgcgttctgctgcgctttttcatgggagatttttttgctgcgcgcttcatcttctaccgctttggcaatggcgcgggaggcgagcagcttattaaacagatcctgacgagcaggcaaacgtgggcctacggcagccagacgttgacgggcaaagtgcatacgcgccacgcgcgccagtttctgagcgatagttttatccgtgccgtgttcatccgccatacggcgcaggctaacactcgggctgaaacgcacaaaactgtcgcgaccgagccacagtacagcgaaaaatttctgtacgccgttaagcatacgcagcggcgggttcacttcgcctttttcacgccccggcgcgcgaccaaacatcacgctcactggcaccatctgcacatccagatttgggttgctacggtgcaaatcgagatagtcgtggaacagcttaatagactcttctttcggcgtgtaataggtgaacacacgcggcccgccgtgaatgaacacatagcgcggcagtagcgtgccgtcgatttccagcggctctaacgggtcaggcaagtcatgtgccagacactgggcgcgcaacgtcagcaaatctgctttgctgttgtacggtaaaacgtacataattggacgagaggtatccagccccagttccggggcaggatctgccggaatagacttgctttttaccaggatgcttaatggtaaattcagtaatttgtagtaaattcgtggccagccggacataaacgatgtaaagcctctggttaataatgcaaatgcgcggcaaggatagcagaaagtcatgggaaattctgtggtatccgctcatgtttcgcgcggcgctacgcaaacccgaatcatcggatttaacggtacactgatattgacgctcataatgtaaaaaggttctttcaatggccaataataccactggattcacccgaattatcaaagctgctggctattcctggaaaggtttacgcgctgcatggatcaacgaagcggcattccgtcaggaaggcgtagcggtattgttggcggtggtcatcgcctgctggctggatgtggacgcgattacccgcgtgctgcttatcagctccgtgatgctggtgatgattgtggaaatcctcaatagcgccatcgaagcagtggttgaccgaattggctctgaataccatgagctttccggacgcgcaaaagatatgggatccgctgcggtgctgattgccattatcgtcgccgtgattacctggtgcattctgttatggagccattttggataacccttccagaattcgataaatctctggtttattgtgcagtttatggttccaaaatcgccttttgctgtatatactcacagcataactgtatatacacccagggggcggaatgaaagcgttaacggccaggcaacaagaggtgtttgatctcatccgtgatcacatcagccagacaggtatgccgccgacgcgtgcggaaatcgcgcagcgtttggggttccgttccccaaacgcggctgaagaacatctgaaggcgctggcacgcaaaggcgttattgaaattgtttccggcgcaagtcgcgggattcgtctgttgcaggaagaggaagaagggttgccgctggtaggtcgtgtggctgccggtgaaccacttctggcgcaacagcatattgaaggtcattatcaggtcgatccttccttattcaagccgaatgctgatttcctgctgcgcgtcagcgggatgagcatgaaagatatcggcattatggatggtgacttgctggcagtgcataaaactcaggatgtacgtaacggtcaggtcgttgtcgcacgtattgatgacgaagttaccgttaagcgcctgaaaaaacagggcaataaagtcgaactgttgccagaaaatagcgagtttaaaccaattgtcgttgaccttcgtcagcagagcttcaccattgaagggctggcggttggggttattcgcaacggcgactggctgtaacatatctctgagaccgcgatgccgcctggcgtcgcggtttgttttagttctctcttcatcaggcttgtctgcatggcattcctcactagttctgataaagcactctggcatctcgccttacccatgattttctccaatatcaccgttccgttgctgggactggtcgatacggcggtaattggtcatcttgatagcccggtttatttgggcggcgtggcggttggtgcaacggcgaccagctttctctttatgctgttgctgtttttacgcatgagcaccaccgggctgactgcgcaggcttatggtgccaaaaatcctcaggcattagcccgtacgctggtgcaaccgttgctgttggcgttgggggctggggcgttaattgcgctgctgcgtacgccgattatcgatctggcgctgcatattgttggcggtagtgaggcagtcctggaacaggcgcggcgctttcttgaaatccgctggttaagcgcaccggcgagcctggcgaatctggtattactcggttggttactcggcgtgcaatatgcccgtgcgccagtaattttgttagtggtcggcaatatcctcaacattgtgctggatgtctggctggtgatggggctgcatatgaacgtgcagggcgcggcgctggcgacggttattgcggaatatgcaacattgctgattggtctgctaatggtgcgtaaaatcctcaaactacgcggaatttccggcgaaatgctgaaaactgcctggcgaggaaacttccgtcgcttgctggcgcttaaccgcgatatcatgctgcgtagcctgttgttgcaactctgtttcggcgcgatcaccgtacttggcgcgcgactggggagtgacattatcgctgttaacgcggttctgatgacgctactcacctttaccgcctatgcgctggatggttttgcctacgcggttgaagcgcactccggtcaggcatacggtgcgcgcgacggtagccagttgctggatgtctggcgggcagcgtgccgccagagcgggatcgtagcgttactgtttagcgtggtttatttgctggctggggaacacatcattgcgttactgacgagcttaacccagattcagcagctggctgaccgctatcttatctggcaggtgattttgccggtggttggcgtctggtgttatctgctggacggcatgtttataggcgcaacgcgtgccaccgaaatgcgtaacagtatggcggtggccgccgcaggttttgcgctgacgctccttacgctgccgtggctgggtaatcatgctttgtggctggcattaaccgtctttctggcgttgcgcgggctttctctggcggctatctggcggcgtcactggcgcaatggtacctggtttgccgcaacgtgacggttaaaaattctgaataaataatcctaagccaaattgctgactacacttaatctcacgttcagaagaaaagtgaacgtactctcattcacaacctaacgatgaggtcttgattatgaataaagatgaagccggcggtaactggaaacagtttaaaggtaaagtgaaagagcaatggggcaaactgaccgatgatgatatgacgatcattgaaggtaaacgtgatcaactggtcggtaaaatccaggaacgttatggttatcagaaagatcaggcagaaaaagaggtcgtggattgggaaacccgcaatgaatatcgctggtaattaatccctcctgcccgacgtgtacaaggatgtacgccctcttaacgcggtttctttttcacctgcacagagtgatcatgctggcactgttcaggatgacgacacgcttccacttctacacatgccgcacagagcccatgtgcttcaatcacattatgccgcagggcaaaccccatttttgccgccagcgtatgcataatgtcttccacgccttctgcacactcttctttcactgcgccgcagcgatcgcaaataaacatggcactcgtatgggtgggctgatcgaacagatgacagagcacataactgttggtggattccaccttatgcacaaaaccttgctcaagcagaaaatccagcgcgcgataaaccgttggcggcttggcttgcggttcagcttcgcgcagtaaatcaagcagatcataagcgctgatagcgccatcctgcagactcatcaggcgcaacacttccaggcgctgtggggtcaggcgcacattacgctgcgcgcagattttttcagcctgcgctaataactcctgcgttgtggtcttttccatcgggcacctcaaagtgggggttaagaatgtccttactttaccatgttccaggaaaaacaccgagaacccttattgttgccgtaatgttgattttctgctttgtaggtaaggtgttatgttgccttgtcgtaccattatcaacacgataataattaataattcatttttaaataaattgcttcaagttaactcgctatttatttaactgggtttaaacgcatacctgtagttcagaaattatgagcgatttttgatagtgaccagatggcaaaagaattataaggaggacacggtacgacaaaaaaggtagatgaatcatgttgaagataatacccggtgcaactggatactttaataaaacactcaatagtaatcaattcgataatgaagatgcaatcaaagataaattagataatagaggtagtatcaaaggtaaattaaataatatatatggtaaatctattgattatgcagcgctgcgtcatcgggatataattattgcaaaaatagatttgtttattcaacgaatcacgcataatttatggcatgcacgtaaaaaaatgtgtttttaattgtgcaaataaatgatctcaaaatgtgggtcaataagtatattgacgattgcactgatgaggatttaaacgatcgtgactttattgcaagtgttgttgaccgggctatttttcatttcgcgattaatagtatatgtaatcctggggataataaagatgcaatgcccattgaacaatgtacttttgatgtagaaactaagaatgaccttccctccacggttcagctattttatgaggaatctaaggataatgaacctttagcgaatatacattttcaagcaataggttctggttttttaacgtttgttaatgcctgccaggaacatgatgacaacagcttaaaattatttgctagcctgttaattagtcttagttattctagtgcctacgcagatttaagtgaaacagtgtatattaatgaaaataatgagagctacctgaaagctcagtttgaaaaattatctcaacgtgatatgaagaagtacctgggagagatgaagcgtctggctgatgggggagaaatgaattttgatggctatctggataagatgagtcatctggtgaatgaaggaacgctcgatcctgatattttaagcaaaatgcgagatgctgcaccacaattaattagcttcgcgaagagctttgacccaaccagtaaggaagagattaaaatacttacagacacttctaaattaatttatgatttgttcggggttaaaagcgagaaataatatgtgaagttcttcgatagtatggaaggcattatataaaaggacccaatatttattgggttcttttttctctatcaatactattagcagggagatatatcaccagagtttaatgtgtgattttttatttatcgtcgaacctggattgtttatcattggccttaacaaagttaacggctaataagattatttccatcacttcgtgagagcttcatgccttgagaggatctcaattttcttttgcaatgagacaggcgcttcctgttgttatggtatagtaccccgctattgagcctcctgaatagtgatgctgaataacataaccccatgatatatcgataaaataatctctacatttgaaaatgcacggtaattctgaaatgcaaaaaatcaaccaaaccagcgcaatgcctgaaaaaactgacgttcactggagtggtcggtttagcgttgcaccaatgctcgactggacggacagacattgccgctatttcttgcgtctgctttcccgcaatacgttgctgtataccgaaatggtgaccacaggggcgattattcacggtaaaggtgattatctggcgtacagtgaagaagaacatccggtagcgttgcaactgggcggtagcgatccggcggcgctggcgcagtgtgcaaagctggcagaagcgcgcggatatgatgagatcaacctgaatgtcggctgcccgtctgaccgggtgcagaacggcatgtttggtgcgtgtctgatgggtaatgcgcagctggttgccgactgcgtgaaagcgatgcgcgatgtggtgagcattccggtgacggtgaaaacgcgtattggcatcgacgaccaggacagctatgaatttctctgcgatttcatcaataccgtttccggcaaaggcgagtgtgagatgttcatcatccacgcacgtaaagcctggcttagcgggttaagcccgaaagaaaaccgtgaaatcccgccgctcgattatccgcgtgtgtatcaactgaagcgtgactttccgcatctgacaatgagcattaacggtggtatcaagagcctggaagaggccaaagcacacctgcaacatatggatggcgtgatggtcgggcgcgaggcgtatcagaatccgggtattctggcggcggtagaccgggagatctttggttccagcgataccgatgccgatccggtggcggtagtgcgcgccatgtatccgtacattgagcgtgaactcagccaggggacgtatctcggccatattacccggcatatgttgggcttgttccagggtattcctggcgcgcggcagtggcggcgttatttaagtgaaaatgcccataaagcgggtgcagacattaatgtgctggaacacgcgctcaaactggtggcggataagcgttaacttttcaccaaaaagtagtcaaattcaccacgccctgcgcaccgtcgcggggcgttttgctgttaaatcaatagattatttttggcatgattcttgtaatgccagcaagagatttcatatttgggagagcatcatgctggaactactttttgtgattggcttttttgtcatgctgatggtcaccggcgttagcttgctgggcattatcgccgcgctggttgtggcgacggccattatgttcctcggcggtatgctggcattgatgattaagttgctgccgtggttactactggcgattgcggtggtgtgggttattaaggcgattaaagcaccaaaagtgccgaaatatcagcgttatgaccgctggcgttactaagggattgtgcggatgatcacaacctaaggttttatccttagaacaaaataggaattaataatcaaatctgtcactattgcgcctctaacagattcatcgtgctgtaccctacatacagccgaactataaaaagaaagggcttcccaggtggaagccctatttcttttatggaatcagcaggctggaaccttgcgtcgcccggctttccagaatctcatgcgcacgctgcgcatccttcagcggatatttctgctgctcggcgacatcgaccttaatcacaccgctggcaatcaaagagaacagttcattactggcctcggttaattcctcccgcgtggtgatatagccttgcagggaagggcgtgtcacatacaagctgcctttttgattgagaatgcctaagttcacaccggtaaccgcaccactactgttgccaaaactgaccattaagccgcggcgttgcaggcaatccaggctccgttcccaggtgtctctgcccacggaatcgtacaccacgcgcactttcttaccgccggtgatctcttttaaccgctcgaccagatcctcttcacgatagttaataacctgccacgcgcccgcttttagcgcgctctgcgctttttgcgcggttcctacggtgccgataagtttcgcgcccagggcttttgcccactggcaggcaattaagccaacgccgccagccgctgcgtggaacaggaactgttcatcgggtttaatttcataggttttgcgcagcagataataaaccgttaagcctttcaggaaggatgccgcagcttgctcaaaagaaattgccgcaggcagaatcgccgctttatccgcaataatgttatgcacagagctgtaagcgcctaacgcgctctgcgcatagactacacgatcgcctgccttaatatgctttacaccactgccgactttactcacgatgcctgctgcttcggtgcctaatccgctgggtaggcttggcggcgggtaaaggccgctgcggatatatgtgtcgataaaattgatgccgatggctttattttcgacctggatttcattctccgccggatcggcaggagtgaactctacggcttgaagtacttccgggccaccgtgcttgtgaaattcaattcgtgttgccatgtgtcctccagaacgtatcgtcagggtctgcttcatatgataaagtttcgacccattctttatctcggtaactccattcactatggcaggaaataaacccttcaacaaacagcaggctgaaccccgcgaacgcgatccacaagttgccgggctgaaagtgcctccgcacagcatcgaagcggagcagagcgtgttgggcggtttaatgctagataacgaacgctgggatgatgtagccgagcgtgtggtagcagacgatttttacacccgcccacaccgtcatatctttactgaaatggcgcgtttgcaggaaagcggtagccctatcgatctgattactcttgcggaaagcctggaacgccaggggcaactcgatagcgtcggtggttttgcttatctggcagagctgagtaaaaatacgccaagtgcggctaacatcagtgcctatgcggacatcgtgcgtgaacgtgccgttgtccgtgagatgatcagcgttgcgaatgagattgccgaagctggttttgatccgcaggggcgtaccagcgaagatctgctggatctggctgaatcccgcgtctttaaaattgccgaaagtcgtgcgaacaaagacgaagggccgaagaacatcgccgatgtgctcgacacaaccgtggcgcgtattgagcagttgtttcagcagccacacgatggcgttaccggggtaaacaccggttatgacgatctcaacaaaaaaaccgctggcttgcagccgagcgatttgatcatcgtcgccgcgcgtccgagcatgggtaaaacaacatttgcgatgaacctcgtcgaaaacgcggcgatgttgcaggataaaccggtacttatcttcagcctggagatgccaagtgaacagatcatgatgcgttctctggcgagcctgagccgcgttgaccagactaaaatccgtaccgggcagctcgatgacgaagactgggcgcgcatttccggcaccatgggtattttgctcgaaaaacgcaatatctatatcgatgactcctccggcctgacgccaacggaagtgcgttcccgcgcacgccgtattgcccgtgaacacggcggcatcgggcttatcatgatcgactacctgcaactgatgcgcgtaccggcgctttccgataaccgtacgctggaaattgcagaaatctctcgcagcctgaaagcactggcgaaagaactgaacgtgccggtggtggcgctgtcccagttgaaccgttctctggaacaacgtgccgacaaacgcccggtcaactccgacctgcgtgaatctggctctatcgagcaggatgcggacttgatcatgtttatctatcgtgatgaggtgtatcacgaaaacagtgatttaaaaggcatcgcggaaattattatcggtaaacaacgtaacggcccaatcgggacggtacgcctgacctttaacggtcaatggagccgcttcgacaactatgcggggccgcagtacgacgacgaataataattattttatgaattaggtaattaaagcaaacacttatcaaggaacacaaatgcaagcggcaactgttgtgattaaccgccgcgctctgcgacacaacctgcaacgtcttcgtgaactggcccctgccagtaaaatggttgcggtggtgaaagcgaacgcttatggtcacggtcttcttgagaccgcgcgaacgctccccgatgctgacgcctttggcgtagcccgtctcgaagaagctctgcgactgcgtgcggggggaatcaccaaacctgtactgttactcgaaggcttttttgatgccagagatctgccgacgatttctgcgcaacattttcataccgccgtgcataacgaagaacagctggctgcgctggaagaggctagcctggacgagccggttaccgtctggatgaaactcgataccggtatgcaccgtctgggcgtaaggccggaacaggctgaggcgttttatcatcgcctgacccagtgcaaaaacgttcgtcagccggtgaatatcgtcagccattttgcgcgcgcggatgaaccaaaatgtggcgcaaccgagaaacaactcgctatctttaataccttttgcgaaggcaaacctggtcaacgttccattgccgcgagcggtggcattctgctgtggccacagagccattttgactgggtgcgcccgggcatcattctttatggcgtcagcccgctggaagatcgctccaccggtgccgattttggctgtcagccagtgatgagtctaacctccagcctgattgccgtgcgtgagcataaagccggagagcctgttggttatggtggaacctgggtaagcgaacgtgatacccgtcttggcgtagtcgcgatgggctatggcgatggttatccgcgcgccgcgccgtccggtacgccagtgctggtgaacggtcgcgaagtaccgattgtcgggcgcgtggcgatggatatgatctgcgtagacttaggtccacaggcgcaggacaaagccggggatccggtcattttatggggcgaaggtttgcccgtagaacgtatcgctgaaatgacgaaagtaagcgcttacgaacttattacgcgcctgactagtagggtcgcgatgaaatacgtggattaatcgttctgtaatatttgattgtctgtgccggatgcggcgtgaatgccttatccggccaataaaatcctaaaaattcaataagttgatgttctttcatgctcttataaaggtcgtgcctctggcggatgtacgtttgtcatgagtctcactctgttgctaattgccgttcgctcctgaacatccactcgatcttcgccttcttccggtttattgtgttttaaccacctgcccgtaaacctggagaaccatcgcgtgtttcaaaaagttgacgcctacgctggcgacccgattcttacgcttatggagcgttttaaagaagaccctcgcagcgacaaagtgaatttaagtatcggtctgtactacaacgaagacggaattattccacaactgcaagccgtggcggaggcggaagcgcgcctgaatgcgcagcctcatggcgctagcctttatttaccgatggaagggcttaactgctatcgccatgccattgcgccgctgctgtttggtgcggaccatccggtactgaaacaacagcgcgtagcaaccattcaaacccttggcggctccggggcattgaaagtgggcgcggatttcctgaaacgctacttcccggaaagtggcgtctgggtcagcgatcctacctgggaaaaccacgtagcaatattcgccggggctggattcgaagtgagtacttacccctggtatgacgaagcgactaacggcgtgcgctttaatgacctgttggcgacgctgaaaacattacctgcccgcagtattgtgttgctgcatccatgttgccacaacccaacgggtgccgatctcactaatgatcagtgggatgcggtgattgaaattctcaaagcccgcgagcttattccattcctcgatattgcctatcaaggatttggtgccggtatggaagaggatgcctacgctattcgcgccattgccagcgctggattacccgctctggtgagcaatagcttcagcaaaattttctccctttacggcgagcgcgtcggcggactttctgttatgtgtgaagatgccgaagccgctggccgcgtactggggcaattgaaagcaacagttcgccgcaactactccagcccgccgaattttggtgcgcaggtggtggctgcagtgctgaatgacgaggcattgaaagccagctggctggcggaagtagaagagatgcgtactcgcattctggcaatgcgtcaggaattggtgaaggtattaagcacagagatgccagaacgcaatttcgattatctgcttaatcagcgcggcatgttcagttataccggtttaagtgccgctcaggttgaccgactacgtgaagaatttggtgtctatctcatcgccagcggtcgcatgtgtgtcgccgggttaaatacggcaaatgtacaacgtgtggcaaaggcgtttgctgcggtgatgtaatgcaggaaagcaggctggagctacccagcctgcagtgaaattaaactgtcgtcgctttcactctttctttatagatgatttttttgatgccatcgttctacgtgagagataataaacgttgttagttcttttattgttaagcttatcccaattatctggaattccttatcctgtttttttgggtggagtaataatttctgcacatctaaccattattaaatttaataataagtatcgggtttgttacgatagaatatttctatatcctcaagaatatgctttgccttattgcctgtgactttctgagattcaattatagtatcgttaaattctaatgttaaagagaactcttttttccgctttgtgtaagtttaaccttatattgattaccaatatcaaataaaaaggtcctgtaatgagaataatcacctttaacctcctcggcaaaacagcaaagcgtgcaaatatacataaagtctttcttacccctgattttgttaactaaatcaataaatgcgtgaaaaactttacttgcaatagaacttgatacttcttctccaggtctaaaaaatcttttgcaatttttaactgtgtttctatgtataaaaagaaatctttggcataagagatatctttattatttagtgcatctagctcaacaggtaaagatgtcgttttgttgctattcacatatgatatattcatatcatcatctccatcgcgagtaataaaattaatcaccattgtagggtagggggctggtcaatcagaaatcatctttataaacttcgattgtttttgtaatgctgtatcattaagttcattaaatcgtacagcagataaatgttctatcaaatttcgctcatttgccgaggattcatcataataaacgtaaaattaatgtatccttacatcgagtaataaacattttttatacaaaaaaagacaggaacgtatttactgggttaaatataatcatcctgcttttcatcacaaaaaccgcagataatccttcctttccccggcagctggcgttatggtcagatggtttttgcaacaaatctcacaataaaaagtttcaacatactgactatttagggaaaaatatgcgcaagatcacacaggcaatcagtgccgtttgcttattgttcgctctaaacagttccgctgttgccctggccagttctcctagtccgcttaaccctgggactaacgttgccaggcttgctgaacaggcacccattcattgggttagcgtcgcacaaattgaaaatagcctcgcagggcgtccgccaatggcggtggggtttgatatcgatgacacggtacttttttccagtccgggcttctggcgcggcaaaaaaaccttcagcccagaaagcgaagattatctgaaaaatcctgtgttctgggaaaaaatgaacaatggctgggatgaattcagcattccaaaagaggtcgctcgccagctgattgatatgcatgtacgccgcggtgacgcgatcttctttgtgactggtcgtagcccgacgaaaacagaaacggttagtaaaacgctggcggataattttcatattcctgccaccaacatgaatccggtgatctttgcgggcgataaaccagggcaaaatacaaaaagccaatggctgcaggataaaaatatccgaattttttatggcgattctgataatgatattaccgccgcacgcgatgtcggcgctcgtggtatccgcattctgcgcgcctccaactctacctacaaacccttgccacaagcgggtgcgtttggtgaagaggtgatcgtcaatagtgaatactgacagagcgggagagcgtgatgctctcccgaatgctgtttttttaatcacacctttatcctttcgctgtcttgctgcaaactgattaagagagttttatcaaggagcagcacatgtggtatcaaaagacgctcacgcttagcgccaaatctcgtgggtttcatctggtaacggatgaaattctgaatcagctggctgatatgccgcgcgttaacatcggcttactgcatctgttgctgcaacatacctccgcctctctgacacttaatgagaactgcgatcccaccgtacgccacgacatggagcgttttttcctccgcaccgttcccgacaacggaaattatgagcatgactatgagggagcagacgatatgccttctcatatcaaatccagtatgctgggaacaagccttgtattgccggtgcataaagggcgtattcagaccggcacctggcaaggcatttggctgggggaacatcgcatccacggcggaagccgtcgcatcatcgcgacactacaaggggagtaaaaaatgaccattagcgagttgctacaatattgcatggcaaaaccaggcgcagaacagagcgtgcataatgactggaaagcgacgcagatcaaagtggaagatgtactgtttgcgatggtgaaagaagtagaaaatcgcccagctgttagcctgaaaaccagcccggagctggcggagctgctacgtcagcagcacagcgatgtgcgtccaagccgccatctgaataaagcgcactggagcaccgtgtatctcgacggtagcctgccagatagccaaatctattatctggtggatgcgtcttatcagcaggcggtgaatttactgccggaagaaaaacgtaaattgctggtgcaactctgaaaggaaaaggccgctcagaaagcggccttaacgattacagcatcggcttaaggaagcgtgccgtgtgacttgcttcgcactccgcgacggtttctggcgtaccggagacgaggatctcgccgccaccactgccgccttctggtcccaggtcgacaatccagtcagcggttttgatcacgtcgagattgtgctcaatcaccacaatggtgttgccctgatcgcgcagtttatgcagtacgtcgagcagttgctgaatatcggcgaagtgcagaccggtggtcggctcgtcgagaatatacagcgtctgcccggtgccgcgtttactcagttcacgcgccagcttcacgcgctgggcttcaccgccactaagggtggttgcggactgccccagtcgaatgtacgtcaggccaacgtccatcaacgtttgcagcttacgcgccagtgcaggtacggcatcaaagaactcacgcgcctcttcgatggtcatatccagcacttcgtggatggttttgcctttgtacttaatctccagcgtttcacggttatagcgtttacctttgcactggtcgcacggcacgtagatatccggcaggaagtgcatctccactttgatcacgccatcgccctgacaggcctcgcagcgtccgccacgaacgttaaagctgaaacgtcccggcgtatagccgcgcgcacgggattccggtacgcccgcaaacagttcgcgcacaggcgtaaacacgccggtataggtcgccgggttagaacgtggagtacgaccaattgggctttggtcgatatcgatcactttatcgaaatgctccagcccctgaatatcgcgatacggtgctggttcggcgatggtcgccccattcaactggcgttgggcaatcgggaacagtgtgtcgttaatcagcgtgcttttaccggaaccactaaccccggtgatgcaggtaaacagacccaccggcagcgtcagcgtcacgtccttcaggttgttgccgcgtgcgcctgtcagcttcagcactttttccggattcgccggaacgcgtttcttcggcacttcaatcttgcgtttgccgctcatgtactgcccggtcaagctctccggcaccgccataatcgcttccagcggaccttctgcgaccacttcaccgccgtgaacacctgcgcccgggccaatgtcgatcacatggtcagcggcgcgaattgcgtcttcgtcgtgctccaccacaatcacggtattaccgagatcgcgcagatggataagcgtacccaacaggcgctcgttatcacgctggtgcaggccgatagacggctcgtccagcacgtacataacgccaaccaggcccgcaccaatctggctcgccagacggatacgctgtgcttcaccgccagaaagcgtttctgcgctgcgggaaagcgtcaggtaattcaggccgacgttaacgaggaatttcagacgatcgccgatctctttaaggattttttctgcaatcttcgcccgctgacctgcgagtttgagattgttgaagaattccatcgcatgaccaatgctcatgtcggagatagcaggcagcggcgtattctcgacatacacgtggcgcgcttcccgacgcagacgcgtcccttcgcagctggcgcacggacgattactgataaacttggctaattcttcgcgtaccgcgctggattccgtctctttatagcggcgctccatattatgcagcacgccttcgaacggatgacgacgaatggaggtatcgccacgatcgttcatgtatttgaattcaatgttttctttgccagaaccgtacaacaccactttatgcacgttcgcgctcaggctgccccacggcgcttcgacgtcgaacttatagtgatctgccaggcttttcagcatctggaaataatagaagttgcggcgatcccagccacggatcgcaccaccagccaggctcagttccggattctggatcactcgatcaggatcgaaatattgctgtacgccaaggccgtcgcaggtcgggcaggcccccgccgggttgttaaagctaaacagtcgcggctccagttcacgcatactgtagccgcaaattgggcaggcgaagttggcggagaacagcagctcttccgctttcgggtcgtccatatccgccactaccgcggtaccaccggaaagctccagcgcggtttcaaaactctcggcaagacgttgggtaagatcgtcacgcaccttgaagcgatcaaccaccacttcaatggtatgtttcttttgcagttccagttttggcggatcggaaagatcgcagacttcgccatcaatacgagcacggatgtagccctggcttgccaggttctccagcgttttggtgtgttcgcctttgcgctctttaatgattggcgcgagtagcatcagacgcttgccttccggctggctcagcacgttatccaccatctggctgacggtttgcgccgccagcgggacgtcgtggtccggacagcgcggctcgccaacgcgggcgaataacaaacgcaaatagtcgtggatttcggtgattgtccccaccgtagaacgcgggttatgagacgtgcttttctgctcaatactgatggcaggagaaagcccctcaatatgatcgacgtccggcttttccatcagactcagaaactgccgcgcgtaggcggaaagggattcaacgtaacggcgctgcccttcggcatataaggtgtcgaaagcgaggctggatttgccagaaccgctaagcccggtcacgacaatgagcttgtcgcgggggataacgaggttgatgtttttgagattatgggtgcgggcgccccgaacttcgatcttatccattcacctttcccggattaaacgcttttttgcccggtggcatggtgctaccggcgatcacaaacggttaattatgacacaaattgacctgaatgaatatacagtattggaatgcattacccggagtgttgtgtaacaatgtctggccaggtttgtttcccggaaccgaggtcacaacatagtaaaagcgctattggtaatggtacaatcgcgcgtttacacttattcagaacgatttttttcaggagacacgaacatggccagcagaggcgtaaacaaggttattctcgttggtaatctgggtcaggacccggaagtacgctacatgccaaatggtggcgcagttgccaacattacgctggctacttccgaatcctggcgtgataaagcgaccggcgagatgaaagaacagactgaatggcaccgcgttgtgctgttcggcaaactggcagaagtggcgagcgaatatctgcgtaaaggttctcaggtttatatcgaaggtcagctgcgtacccgtaaatggaccgatcaatccggtcaggatcgctacaccacagaagtcgtggtgaacgttggcggcaccatgcagatgctgggtggtcgtcagggtggtggcgctccggcaggtggcaatatcggtggtggtcagccgcagggcggttggggtcagcctcagcagccgcagggtggcaatcagttcagcggcggcgcgcagtctcgcccgcagcagtccgctccggcagcgccgtctaacgagccgccgatggactttgatgatgacattccgttctgatttgtcattaaaacaataggttatattgttttaaggtggatgattaaagcatctgccagccataaaaaagaagcctccgttatggaggcttctacgtatcaggtcaaaatcattggccattgtggcggtgtctgattcatctcttctatcatcacgctctcgatgttgtgccagatagcggtgatgtccgccattgtgatgccaagcaaccccattgcgaaccaacaggcggaaacaacgcccagaccgctgctgatcaccgcaagcccgacataatcagaccgacgaaaacggatgttgagtgtgctggccagaaacatcattacggcactaagaagttgccagcgaagaagaaccacgccagtggtgagggtagccatcaaacaattcctctgaaaagagccgatgccctggacagcgcggcgttgttcacgggaggcgtggtacactctggctatcgcggggcttgcagaacacaaaaatgaaacactctgtttgtttcattaattttgtgaactatatcacaattgattgtttgttagccatattaggccgtgacttttattgctgtacagattatgtggtttttcagtggcattaagggcatatcttcccgccgcctctgcattcctgtaggaaattaattttgaatatcaatgaattattttcatccaggtgacgattagaaaggtatcaatttcaaatcaggcaaaagtgctatttataccgtaagatttatctaaagacgtcggtacccagggttttcaccttgcaatggccgggtataaacaggcaggaaattgatagcaatgagtcatcgtgcacgacaccaattactggcgttgccgggcattatctttttagttctctttcccatcattcttagcctatggattgccttcctttgggcaaaaagtgaagtgaataatcagctccgaacctttgctcaactggcactggataaatccgagctggtcattcgccaggcagatttagtgagcgatgcagctgaacgctatcaggggcaagtttgcactccagcccatcaaaagcgaatgttgaatattattcgtggctatctttatattaatgaattgatctatgcccgtgataaccattttttatgcagtagcctgatagcgcctgtaaacggctatacgattgcaccggccgattataagcgtgaacctaacgtttctatctattattaccgcgatacgccttttttctctggctataaaatgacctatatgcagcggggaaattatgtggcggttatcaaccctctcttctggagtgaagtgatgtctgatgacccgacattgcaatggggtgtgtatgatacggtgacgaaaacctttttcagcttaagcaaagaggccagcgcagcaacgttttctccgctgattcatttgaaggatttaaccgtacaaagaaatggctatttatatgcgacagtttatagcacaaaacgcccaattgcagccattgttgcgactagttatcaacgtcttataacccatttttataatcatcttatttttgcgttgcccgccggtattttggggagtcttgttctgctattactctggctacgtattcgacaaaactatttatctcccaaacgtaaattgcaacgcgccctcgaaaaacatcaactttgtctttattaccagccaataatcgatatcaaaacagaaaaatgtatcggcgctgaagcgttgttacgttggcctggtgagcaggggcaaataatgaatccggcagagtttattccgctggcagaaaaggaggggatgatagaacagataactgattatgttattgataatgtcttccgcgatctgggcgattacctggcaacacatgcagatcgctatgtttctattaacctgagcgcctccgattttcatacgagtcggttgatagcgcgaatcaatcagaaaacagagcaatacgcggtgcgtccgcagcaaattaaatttgaagtgactgagcatgcatttcttgatgttgacaaaatgacgccgattattctggctttccgccaggcaggttacgaagtggcaattgatgattttggtattggctactctaacttgcataaccttaaaagtttgaatgtcgatattttgaaaatcgacaaaagctttgttgaaacgctgaccacccacaaaaccagtcatttgattgcggaacacatcatcgagctggcgcacagcctggggttaaaaacgatcgctgaaggcgtcgaaactgaggagcaggttaactggctgcgcaaacgcggcgtgcgctattgccagggatggttctttgcgaaggcgatgccgccgcaggtgtttatgcaatggatggagcaattacccgcgcgggagttaacgcgcgggcaataaaattacaggcggtggcgataatcgctgggagtgcgatcaaactgccgacggaaaacgcgggagaaggtctgctggctgacataacccaggtccattgcgatatcaaaaatcggacgctcggtggtgcgcaactcaacggcggccagtaacaggcggcgttggcgaatgtaatcgccaagcgtctgatgcgtcaccgtgcggaacattcgttgcaagtaccacttactatagccacttttttttgcgactacatcaatgttaagcggctggtcaatatgctcgtcaatccatgcgataagatcctgaataattttctgatgggacataaatctgcctcttttcagtgttcagttcgttaattcatctgttggggagtataattcctcaagttaacttgaggtaaagcgatttatggaaaagaaattaccccgcattaaagcgctgctaacccccggcgaagtggcgaaacgcagcggtgtggcggtaagcgcgctgcatttctatgaaagtaaagggttgattaccagtatccgtaacagcggcaatcagcggcgatataaacgtgatgtgttgcgatatgttgcaattatcaaaattgctcagcgtattggcattccgctggcgaccattggtgaagcgtttggcgtgttgcccgaagggcatacgttaagtgcgaaagagtggaaacagcttagctcccaatggcgagaagagttggatcggcgcattcataccttagtggcgctgcgtgacgaactggacggatgtattggttgtggctgccttagccgcagtgattgcccgttgcgtaacccgggcgaccgcttaggagaagaaggtaccggcgcacgcttgctggaagatgaacaaaactaaagcgccacaagggcgctttagtttgttttccggtctttgtctttctctctatcccgctggtacacaggagggtttcccccgacgtcaacacacctcattcgagcacgtggtggaggttccggttggtgttgatgctttaattgtatgtcaccgacgtttcttcgccagtgtaaaagtatactttttaaccgcaatatttttgtcatctcagacgattttttatcgcaatcctgaacggtatacggctcgataacgctgcaatcttgcgcaccgacgataacgtttgcgcatcaattgcctggtttttcatcgtcaagacaataaaagagaaaaaagcagcaaacttcggttgaaaaagccgctatgatcgccggataatcgtttgctttttttaccacccgttttgtatgcgcggagctaaacgtttgcttttttgcgacgcagcaaattgtcgcaaacctggagcaggaagataacgtttcgctggcaggggattgtccgccacgcatcttgacgaaaattaaactctcaggggatgttttcttatgtctacgccaagtgcgcgtaccggcggtagtctcgacgcctggtttaaaattagtcaacgtggaagcactgtccgtcaggaagtggttgccgggttaacaacgtttctggcgatggtctacagcgtcatcgtcgttccaggtatgttgggtaaagcaggcttcccgcctgcggcagttttcgttgcaacctgtctggttgccggactcggttctatcgtgatgggtctgtgggctaatctgccgttggcgattggttgcgccatctccctgacagcgtttaccgcattcagcctggtgctggggcaacatattagcgtacctgtcgcgctgggtgccgtgttcctgatgggtgtgctgtttacggtaatttctgccacgggtatccgtagctggattttgcgcaacttgcctcacggtgtggcgcacggcacggggattggtatcggtctgttcctgctgctcattgccgctaacggtgtcggtctggtgattaaaaacccgcttgatggtctgcccgttgcgctgggtgatttcgcgaccttcccggtgattatgagtctggtaggtctggcggtgatcatcggcctggaaaaactgaaagtccctggtggcattctgctgaccattatcggtatcagtattgtcggtttgatcttcgatcctaacgtccatttctccggcgttttcgccatgcctagtttgagcgatgaaaacggcaatagtctgattggcagcctggacattatgggcgcgctgaatcctgtagtcctgccaagcgttctggcgctggtgatgacggcagtatttgatgccaccggaactatccgtgccgtcgccggccaggcgaacctgctggataaagatgggcagatcatcgacggtgggaaagcactgaccactgactccatgagcagcgttttctctggcctggtgggtgcggctccggcagcggtatacatcgagtctgcggcgggtacggcggcgggcggtaaaaccggtttgacggctatcaccgttggcgtgctgttcctcctgattctgttcctctctccgctctcttacctcgttccggggtatgcaacggctccggcgctgatgtacgttggcctgctgatgctgagcaacgtggcgaaaatcgactttgctgattttgttgatgcgatggcgggtctggttacggctgtattcatcgtgctgacctgtaacatcgtaacaggcatcatgatcggcttcgcgactctggtgattggtcgtctggtttccggcgaatggcgcaagttgaacatcggtacggtcgttatcgccgtggcgctggtgaccttctatgcgggtggctgggctatctaatctttcatcggattctgaaaacgggtggcaatggctgcccgtttttattttctccgcacattgtgtgagcttttgcgatattctgaaaaaaatgagaattcaggcataacgtctttctcagatcataaaaaacatcgcaaacagggaacgcatggaaatcttcttcaccatactgataatgaccctcgtggtcagcctgtccggggtggtcactcgtgtcatgccctttcagatcccgcttccgcttatgcaaatcgccatcggtgcgctactggcgtggccgacgtttggtttgcatgtggagtttgatcctgaactctttttagtcttgtttatcccgccgttgctgttcgctgatggctggaaaacgccgacccgtgaatttctcgaacatggtcgagagattttcggcctcgcgctggcgctggtggtggtcaccgtggtcggcattggcttccttatttactgggtggtgccgggcattccgctgatccctgcctttgcgctggcggcggtgctttctccgaccgatgctgtggcgctctccgggattgttggcgaagggcgcatcccgaaaaaaatcatgggcattttgcagggcgaagcgttgatgaatgacgcctccggtctggtgagcttgaagtttgccgtagcagtggcgatggggacgatgatcttcaccgtcggcggtgcgacggtcgaatttatgaaagtagccattggcggtattctcgccggttttgtggtgagctggctgtacggtcgcagcctgcgattcctcagccgctggggcggtgatgaacccgcgacgcagatcgtcctgctgttcctgctgccattcgcttcttatctgattgccgaacatattggcgtttccggcatcctcgctgcggttgccgccgggatgaccatcacccgctccggtgtgatgcgccgtgcgccgctggcaatgcgcctgcgtgcaaacagcacctgggcgatgctggaatttgtctttaacggcatggtgttcctgctgttaggtctgcagctgccgggtattctggagacgagcctgatggcagcagaaatcgaccctaacgtcgaaatctggatgctgtttaccaatattattctgatatatgcggcgctgatgctggtccgtttcggctggctgtggacgatgaaaaagttcagcaaccgcttcctgaagaagaagccgatggagtttggtagctggaccacacgagaaatcctgatcgcgtctttcgccggggtgcgtggggcgatcactctggccggtgtgctctctatcccgctgctcttgccggatggtaacgtcttcccggcgcgctatgagctggtgttcctggcggctggcgtcattctcttcagcctgtttgtcggcgtggtgatgttgcctattctgctacaacacattgaagtcgcggatcatagccaacaattgaaagaggaacgtattgcgcgagcggcaacggcagaagtggcgattgtggcgatccagaaaatggaggagcgtctggcggcggataccgaagagaatatcgataaccagctgcttacggaggtcagttctcgcgtcattggtaacctgcgtcgtcgcgccgatggacgtaacgacgttgaaagttccgtgcaggaagagaaccttgagcgtcgcttccgtctggcggcattgcgttctgaacgtgctgaactttaccacctgcgcgccacacgggagatcagcaacgaaacgctgcaaaaattactgcacgatctcgatttgcttgaagcgttgctaattgaggaaaatcagtaagccgaaagcgacgtaaccaggcccgaggtaatctgaaaaaggtgcaatcttttgcacctttaacaggttagctcgggctaacattcatgattctaaaacaaataaattatctctcttttaaagtcaattcattggctgttcttcgacttaacctcaatctgcatcttgcataatatctgcagtaatcttcatagcgactgcatgaagattatcctcagtttgactcatgccagtatgagtggcacaatcttcttcaaagaatttctgtagtgttaccaggatatcactattaatggagatattttcctcaccacggagaatggtaatacccattccctggacgctagcctcatcgaaattaacacgatagagacggatattaaacatccaggcttttgttaaaacagaacagttgaaatggcaattgcttaaattggcattattaaaattaacattagccatattagagtcggtacatataaccatttcgaggaacgtatttgttaaccgcgtaaaaaagagtttgctatcaattaagtttatattctggagggttgctttattcaggttgacacgagacagatcagcatgttcaaagttaattaaatcaagtttagagaagctaaggtcggctctaaataaattaatatatggcgctattactttataaagatttacctcagccatgtatgccatataaaaattactataatcaaggaaggtatttttaatattggctctattcattgttgcattgtagaattgaacatgcatagcggaacaactatttagagttccgtcagtcatttttatctgagcgaaattactgtcatcgagaatacaattatcaaaaagtattttttccattatggcgaaattaaaattcgttttatacatattacagtcctgaaaaatagcgttttgtagtctgcaacctgcaaaattgctattggataaatcttcatctttaatcacgatacctttcaggctaaggtgactaaaatcgtaaccaccatttactgtctgtgggatttcgatagtattattatggacggtgacattatttataaaatataccaccttaatactcacttccttatctttattaaggtaaactcttctcgtaattctatcgtcacatttattatttgcatgactagctatatctataaaatatttatgtattttcctgtccgtttctttcgtgatttttccacttggtaaactatcataaattcttttcattttctgaatcaagcctatcactttttcatgatcatccattttgaaaagagagagggctttattgtcaattaacgtgtttttatgatgtttgctgtaattatcactttttgttttctttgtatgacttggacttgtgacagagtggttatcgttaatcaggcaaagagggaaaaacatattatttaaaccattatagcgcataaaatatccttataattaacaagaaagaaaaggcatattctctgcattatcattttctacgactgtcaaaaatcgctcattttttaatgagtttatttgtttaatattatgggaaaaggtgatgcatttgggagaggaagagtattccccggtcagacgaccggggaaggggagagattaatgcgcgcggccttgctcaacgccaaagccggtctgggagcggataaactgcgcgcggaacagttcacgctcacgcgcgccttccgcactgttatcggttgcgctgaagaaccagatgccgaggaatgccacggtgatagagaacagcgccgggtattcatacgggaagatggctttttcgtgaccaaggatctgtacccaaatcgtcgggccgaggatcatcagtactactgcggtaatcagccccagccagccacccatcatcgcgccacgcgtggtcagtttgctccagtacatagaaagcagaatgatcgggaagttacagctcgccgcgatggcaaacgccagccccaccataaaggcgatgttctgattctcaaacagcacgccgaggataatcgcaatcacgccgaggatcagtacggtgattttacttacccgcagctcttcacgttcggtcgcgccttttttgaagacgttagcgtacaagtcatggctaaccgcggatgcgcccgccagcgtcagacccgcaaccaccgcgaggatagtggcgaaagcaaccgcactaataaaaccgaggaacaggttgccgcccactgcattcgccaggtgaacggccgccatgttgttaccaccaatcagatggcccgccgcgtctttatattccggattcgcaccaaccagcatgatcgcgccgaagccgataataaaggtcagaatatagaagtagcccataaacccggtggcgtagaacacgctcttacgtgcttcgcgggcatcgctgactgtaaagaagcgcatcagaatgtgcggcaagcccgccgtaccaaacatcagtcccagacccagagagagcgcggagatcggatctttcaccagcccgcccggcttcatgatgtcgacacctttcgggtgtaccgccatcgcttcactgaacagattgttgaagctaaagccgacgtgtttcatcaccataaaggccataaagctggcaccgaacagcaacagcacggctttgataatttgcacccaggtggtcgccagcatgccgccgaacaggacgtacatcatcatcagcacgccgaccagcaccaccgcaatgtgatagttaaggccaaacagcagctcgatcagtttacctgcgcccaccatctgggcgataaggtaaagcgccaccaccaccagagaaccacaggcgctaagaatacgaatcggcccttgtttcagacggtaagaggccacatcggcaaaggtgtagcgccccaggttacgcagacgttcggcaatcaggaacaaaatgatcggccagcccaccaggaagcccaggctgtaaattaagccgtcatagccggaggtaaacaccagcgcggagatccccaagaaactggcggcggacatatagtccccggcaatcgccagcccgttctggaagccagtgatattgccgcctgcggtgtagtagtcgctacgagaacgtacgcgtttacttgcccagtaggtaatgccgagcgtaaacacgacgaaaatcaggaacataataatcgcctgccagttcgttggctggcgctctacggccccgctaatagcatccgcggcgttagctgcgaaagggagtgtggcggcaagcgccgtcagaactcttttcatgatgcttgtacctcatgcagttatttcaacttgcttgtacctcatgcaggacttcattattaagacggtcgaattcgccgttcgcccgccagatgtagataccggtgagaacaaaggagatcacaatcactccaacaccaattggaataccgcgtgtgacgctggtgttcggattcagcggcgtgcccagccagccgggcgcgaaggcgatcagtaaaataaagccgatataaactgccagcataataatgctcaggatggtggcaaaccgttgccgtttttcgactaactccctgaaatgcgcattgtcttctatccgctgataaatagtgccattcatcacagattctccagaggtaatgtagggattgttttaattcccgctcccttatgggagaaggttaacgctcgggtaacccttgccgaatgtaggccggataaggcgtttacgccgcatccggcaatcaatgcctgatgcgacgctgtcgcgtcttatcaggcctacaaaccgttaccgactcgcatcgggcaattgtgggttagcttggcatcgcgatagcctgcttctcttcaagcagcttctcgactacgccaggatcggcaagcgtgctggtatcgcccaggttgctggtatcgcccgccgcaattttgcgcagaatacggcgcataattttgccggagcgggttttaggcagggagtcggtccagtgcagcacgtctggcgtcgccagcgggccaatctctttacgcacccagttgcggacttctgcgtacagttctggactcggttcctccccgtgattaagcgtgacgtaggcgtagatcgcctgacctttaatattgtgcggaatacctactacggcggcttcggcaatcttcggatgcgccaccagcgcgctctcaatctctgccgtccccagacggtgaccggagacgttcagcacgtcgtccacacgcccggttatccagtaatagccatcttcatcgcgacgcgcgccgtcgccgctgaaatacatatttttgaaggtggagaagtaggtctgttcaaaacgttcgtgatcgccaaacagcgtacgcgcctgacccggccaggagtcggtgattaccaggctaccttcggtggccccctccagcgggttaccttcgttatcgaccagcgccggttgcacgccgaagaacggacgtgttgcgctaccggctttcagctcggtagcgccaggcagcggggtgatcatgaaaccgccggtttcggtctgccaccaggtatcgaccaccggacatttctcgttgccgatttttttccagtaccactcccacgcttccgggttaattggctcgcccacggaaccgagaatgcgcaggctgctacggtcggtgccttcgatcgctttatcgccttccgccatcagcgcgcggatcgccgtgggtgcggtatagagaatattgacctgatgcttgtccaccacctgcgccatacgggcaggcgtcggccagttgggtacgccttcaaacatcagcgtggtcgcaccgcaggccagcgggccgtacagcaagtaactgtgtccggtcacccagcccacatcggcggtgcaccagtagatatcacccggatgataatcaaagacatatttaaaggtcagcgccgcgtacaccagataaccgccggtagtatgcagcacaccttttggcttaccggtagaaccggaggtgtagagaataaacagcggatcttcggcgttcatctcttccgcctggtgctgatcgctcgcttgctcaaccaggtcgtgccaccacaggtcgcgcccttcctgccagtcaattttcccgccagtacgcttcagtaccaccacatgctctacgctggtgacgttcgggtttttcagcgcgtcatcaacgtttttcttcagcggaatactgcgcccggcacgcacaccttcgtcggaagtgatcaccagtcgactgttggaatcaataatgcgcccggcaacggcttccgggctgaagccgccgaaaatcacgctatgcaccgcgccaatgcgggcgcaggccagcatcgcaaccgcggcttccggcaccatcggcatataaatcgccaccacatcaccttttttaatgcccagctcgagcagggtattggcgaagcggcagacgtcgcggtgcagctctttatagctgatatgtttgctctggctggcgtcgtcgccttcccagatgatggcggtacgatcgccgttttcttgcagatggcggtcaaggcagtttgccgccagattcagcgtgccgtcctcgtaccatttaatggacacattaccgggggcaaaggaggtgtttttcaccttctggtaaggtttgatccagtcaagaatttttccctgttcgccccagaaggtatcaggtacgttaatagattgttgatacatcgcctcgtactgctgagggtttatcaggcaacggtctgcgatgttggcaggaatggtgtgtttgtgaatttggctcatgcttttgttctccttgtaggatgttaataatatgtggcataagcgttaaatgtaggggtattggcagttttgtttagtatttgggcgacagatcacgcaaaagtagaattgtgcaaataaacggcagggtaatttttgaaggtcagcaacaaaagttgattaattctttgaggaacatgcagttatgcatgctgttgaaaaagaggaagatactgactaactctaaagtggtattttacatgcacttacaattgattaaagacaacattcacagtgtggttatttgttacacataggggcgagcaatgtcatgacagtgtaggtgcggttactgtcgtgaaaaacaataaaaaccgccattgcaacaatggcgcaattcggatgaagcccctatgacaaggataaaaataaacgcacgccgtatcttcagcttattgattccttttttctttttcacttctgttcacgctgaacaaacggctgctcccgcaaaacctgtaactgtggaagcgaagaatgaaacctttgccccgcagcatcccgatcaatatctctcctggaaagccaccagcgaacagagtgagcgtgttgacgccctggcggaagatccacggctggtgatcctgtgggcggggtatcccttcagccgcgattacaacaagccgcgtggacatgcttttgctgtgaccgatgtgcgtgaaaccctgcgtaccggtgcgccgaaaaacgctgaagatggtccgctaccgatggcatgctggagttgtaaaagcccggatgtggcgcgtctgatccagaaagacggcgaagatggctacttccacggtaaatgggcgcgcggcggtccggaaatcgtcaacaacttaggttgtgccgattgccataacaccgcctctccagagttcgccaaaggcaaaccgaagttaaccctttcccgtccgtatgcggctcgcgcgatggaagccattggtaaaccttttgagaaagccggacgtttcgaccagcaaagcatggtttgcggtcagtgccatgtggagtattacttcgacggcaaaaacaaagcggttaaattcccgtgggatgacggcatgaaagtcgaaaatatggagcagtattacgacaaaattgccttctctgactggactaactccctgagcaaaacgccaatgctgaaagcgcagcacccggaatatgaaacctggacagcgggcattcacggtaaaaacaacgtgacctgtatcgactgccatatgccaaaagtgcagaacgccgaaggcaaactctacaccgaccataaaattggtaatccgtttgataacttcgcccagacttgtgcgaactgccatacccaggacaaagctgccttgcaaaaagtggtcgcggaacgtaagcagagcattaacgacctgaaaatcaaggttgaagatcaactggttcacgctcacttcgaagcgaaagcagcgctggatgcaggcgcgacggaagctgaaatgaagccaattcaggacgatatccgtcatgcccagtggcgctgggatctggcgatcgcttcccacggcattcatatgcacgcaccggaagaaggtttacggatgctcggtacggcgatggataaagcggcggatgcacgcaccaaactggcgcgcctgctggcgaccaaaggcatcacccatgaaatccagatcccggatatcagtaccaaagagaaagcccagcaggccattggcctgaacatggaacaaatcaaggccgagaagcaggacttcatcaaaacggtgatcccgcagtgggaagaacaggcacgtaaaaacggtctgttaagccaataaccccgttccgcctcgcaaggggcggaaaacacaatggagtgaatatgagcgtattacgtagcttattaactgccggggtgctggcgagcggcctgttgtggagcctgaacggaattaccgctacccctgcggcgcaggcatctgatgatcgctacgaagttacccagcagcgtaacccggatgccgcctgtctggactgtcataaaccagataccgaaggtatgcatggaaaacatgcttccgttatcaacccgaataacaaactgccggtcacctgcaccaactgtcacggccagccaagtccgcaacaccgcgaaggggtgaaagatgtgatgcgctttaacgagccgatgtacaaggttggagagcagaacagcgtctgtatgtcctgtcatctgccggaacagttgcaaaaagcgttctggccgcacgatgtccacgtaaccaaagtggcgtgcgccagctgccattccctgcatccacagcaagatacgatgcagacgttaagtgacaaaggacggattaagatttgcgtcgattaccacagcgatcagcgcaccaatccgaactttaacccggcgtctgttccgttgcttaaggagcagccatgacctggtctcgtcgccagtttctcaccggcgtcggcgtgctggcagccgtcagcggcaccgcagggcgcgtggtggcgaaaacgttgaatatcaatggggtgcgttacggcatggtgcatgacgagagcttatgcatcggctgtaccgcctgtatggatgcttgtcgggaagtgaacaaggtgccggaaggcgtcagccgcctgacgattattcgtagcgagccgcagggcgaatttcctgatgtgaaatatcgcttcttccgtaagtcttgccagcactgcgatcatgcgccgtgcgttgacgtctgcccgaccggtgcgtcttttcgcgatgctgccagtgggattgtcgatgttaatccggatctctgcgtcggttgtcagtactgcatcgccgcctgtccgtaccgcgtgcgctttatccatccggtcacgaagacggcggacaaatgcgatttctgccgtaagaccaatttgcaggccggtaagttgcccgcgtgcgttgaagcttgcccgaccaaggcgctgacgtttggcaatctggacgatcccaacagtgagattagccaactgctgcgccagaagcccacttaccgctacaagctggcgctgggaaccaaaccgaagctgtaccgcgtaccgtttaaatacggggaggtgagccaatgacgcagacttccgcatttcattttgaaagcctggtgtgggactggccgattgccatctacctgtttttgattggtatttctgctggtctggtgacgctggccgtgctgttacgtcgcttctacccgcaggcgggcggtgcagacagtacgttgctgcgcaccacgctgattgtcgggccgggcgcggtgatcctcggtctgttgatcctcgtcttccacctgacaagaccgtggaccttctggaagctgatgttccactacagttttaccagcgtgatgagcatgggggtgatgctgtttcagctctacatggtggtgctggtgctgtggctggcgaaaatctttgaacatgatttgcttgccctgcaacaacgctggttgccgaagctggggatcgtgcaaaaggttctgagcctgctgacgcccgttcatcgcggactggaaacattgatgctggtgctggcggtgttgttgggggcttataccggctttctgctgagcgcgctgaaaagctatccgttcctcaataacccgatcctgccggtgctgttcctcttctccggcatcagctccggtgcggcggtggcgctgatcgccatggcgatacgccaacgcagtaacccgcattccacggaagcgcagtttgtacaccgtatggaaatccctgtggtatggggtgaaatcttcctgctggtggcgttttttgtcggtctggcgctgggcgatgacggtaaagttcgtgcgctggtggcggcattaggtggcggtttctggacgtggtggttctggcttggtgtcgccgggctggggctgattgtgccaatgctgctcaaaccgtgggtcaatcgcagttccggcattcctgccgtgctggcggcgtgtggggccagtctggtcggcgtgttgatgctgcgctttttcattctctacgccggacagttgacggtggcgtaagccagaaaagaggtggtttctggacgtattccttcctgaagtcggttttctggcgttgttgttaagtctcggggtcaacgtgttgaccccgttgacggccttcgcgggagtgcggttgcgctggcctgccatgatgcgactcacttgcatcggcattctggcgcagttcgcgctcctgctgctcgcctttggcgtactgacgtattgttttctcatcagcgatttcagcgtcatttatgtcgcgcaacatagctatagcctgctgagctgggaactcaagctggcagcggtgtggggcggccatgaaggtagcctgctgctttgggtgctgctgctttccgcctggagcgcgctgtttgcctggcattatcggcagcaaaccgatccgctatttccgctgacgttagccgttttatctctcatgctcgccgcactgctactgtttgtggtgctgtggtccgatcccttcgtgcggatatttccaccagcaatcgaaggccgcgatctcaatccgatgctgcaacatcccggtcttatctttcatccaccgctgctttaccttggctatggcggtttgatggtagcggcgagcgtggcgctggcgagtctactgcgcggcgagtttgatggtgcctgcgcccgaatttgctggcgctgggcgttacctggctggagtgcattaacggcggggatcatcctcggttcctggtgggcctactgcgaactcggctggggcggctggtggttctgggatccggtggaaaacgcctctttattaccctggctttctgccactgcgctgctgcacagtttgtccctgacacgccagcgggggattttttgccactggagcctgttgctggcgatagttactctgatgctgagcctgctgggcaccttaattgtccgttctggcattctggttagcgttcatgcgttcgcgctggataacgtccgcgccgtgccgttgttcagcctgtttgcactgattagccttgcgtctctggctctgtatggctggcgagcgcgggacggtggcccggcggtgcattttagcgggttaagccgggaaatgttaatcctcgctacgctgttgctgttttgcgcagtgctactgatcgtgctggtgggaacgctttatccgatgatttacggcctgctgggctggggacgcctctccgttggcgcgccgtattttaaccgcgcgacgttaccgtttggtctgttgatgctggtggtgattgtgctggcgacgtttgtctctggcaaacgcgtgcagcttccggcgctggtagctcatgcgggcgtgctgttatttgccgctggggtcgtggtctccagcgtcagccgtcaggagatcagcctgaatttacagccgggtcagcaggtgacgctggcaggatacaccttccgttttgagtgcctcgatctacaagccaaaggcaattacaccagcgaaaaagcgatagtggcactgtttgaccatcagcaacgcattggtgaactgacgccggagcggcgtttttatgaagcacgccgtcaacaaatgatggaaccgagtattcgctggaacggcatccatgactggtatgcggtcatgggggagaaaactgggccggatcgttacgcttttcgtttgtatgtacaaagcggtgtgcgctggatctgggggggaggattgttgatgattgcgggcgcattgttaagcggatggcgggggaagaagcgcgatgaataaagggcttctcacgctactgctgttatttacctgttttgcgcacgctcaggtcgtagacacctggcaattcgccaatccgcaacaacagcaacaggcgttaaatattgccagccagttacgttgtccgcagtgccagaatcaaaacttactggaatccaacgcgccggtggctgtcagtatgcgccatcaggtttacagcatggtggcggaggggaagaacgaagtcgaaatcattggctggatgaccgaacgctacggagattttgttcgctataacccaccgttaacgggtcagacgctggtgttatgggcgctgccagtggtgttgttactgctgatggcactgatcctctggcgagtgagggcgaagcgatgaaacagcccaaaataccggtgaaaatgctgacaacactcacgatattgatggtatttctctgtgtcggcagttatctgttaagcccaaaatggcaggcggtacgtgcggagtatcagcgtcagcgcgatccgctacatcagtttgccagccagcaaaccccggaagcgcagcttcaggcattgcaggataaaatccgcgctaatccacaaaacagcgaacagtgggcgttactgggcgagtactatctgtggcaaaacgattacagcaatagcttgctggcgtaccgtcaggcgttgcaactacgtggtgagaacgctgaactgtatgcggcgctggcgacggtgctttattaccaggccagccagcatatgaccgcccagactcgcgcaatgatcgacaaggccctcgcgctggacagtaatgaaatcaccgccctgatgctgctggcttccgatgcgtttatgcaggcgaactacgcgcaagccatcgaactatggcaaaaagtgatggatctcaacagtccgcgagttaaccgaacacagctggttgagagcattaatatggcgaaattgttgcagcggagattggattaatcatctggtgatgaagattatgtcattgagctgcataaaaaataatcgaatgaacatatgccaaaaataatcactaatcagtattattgcagattaaacaaataaaaatctttccataacaaatggttattcattaatcctgccataaactcgcgttattatgcattaatgcagcgaaaagctctgttgttaaagggttgcgcaacataccgcgcaaatgatactgatcataagcgttaaaaaaatctacaaaccaacgcaacacaattcatgccccggcagtatgtcacgttctcgcgtttctgaacggggaacggcgctccattgaggaagtcattcatatgaaaaatataaaattcagcctggcctggcagattctgtttgctatggtgctgggcattctcctgggaagctacctgcactaccatagcgacagccgcgactggctggtcgtcaatttgctctctccggcgggtgatatcttcatccatctgattaaaatgattgttgtgccgattgtgatctccacgctggtggtgggtatcgcgggtgttggtgatgccaaacagctcgggcgtattggcgcgaaaaccattatctacttcgaggtgatcaccaccgtcgccatcattttggggatcactctggcgaacgtcttccagcccggtgccggggtggatatgagccagttggcgaccgtcgatatcagcaaatatcagagcactacggaagcggtacaaagcagttcccacggcattatgggcacgattttgagcctggtgccgacgaacattgtggcgagcatggcgaaaggcgaaatgctgccgatcatctttttcagcgtgctgtttggtctggggctttcttccctgcccgcgacgcatcgtgaaccgctggtgaccgtgttccgctccatctctgaaaccatgtttaaagtgactcacatggtgatgcgttatgcaccggtgggtgtgtttgcgctgattgcggtgacggtggctaactttggtttcagctctctgtggccactggcgaaactggtgctgctggtgcatttcgccattctgttcttcgcgctggtagtgctgggaattgtggcgcgcctgtgcgggttaagcgtctggatcctgattcgtattctgaaagatgagctgattctggcgtactccactgccagctctgaaagcgtgctgccgcgaattattgagaagatggaagcctacggagcaccggtgagcatcaccagtttcgtggtgccgaccggttactcttttaaccttgatggtagcacgctgtatcaaagtattgccgctatcttcatcgcgcagttgtatggcattgacctgtccatctggcaggaaatcattctggtgctgacgctgatggtgaccagcaaagggattgctggcgtgcctggcgtgagctttgtggtgttgctggcaacgctgggtagcgtaggtattccgctggaaggtctggcgtttattgctggtgttgaccgtatcctcgacatggcgcgtactgcgctgaacgtggtgggtaatgcgctggcggtgctggtgattgccaagtgggaacacaaatttgaccgtaagaaagcgctggcttatgagcgtgaagtgctgggcaaatttgataaaactgcggatcaataattgaagattgccggggatatccacccggcaatgtgtgaatgcctgatgcgacgcttgccgcgtcttatcaggcctacgccagacagcgcaatagcctgatttagcgtgattttgtaggtcggataaggcgtttatgccgcatccgacatcaacgcctgatgcgacgcttaacgcgtcttatcaggcctacgccagacagcgcaatagcctgatttagcgtgattttgtaggtcggataaggcgtttacgccgcatccgacatcaacgcctgatgcgacgcttgccgcgtcttatcaggcctacgccagacagcgcaatagcctgatttagcgtgattttgtaggtcggataaggcgtttatgccgcatccgacatcaacgcctgatgcgacgcttaacgcgtcttatcaggcctacgccagacagcgcaatagcctgatttagcgtgattttgtaggtcggataaggcgtttacgccgcatccgacatcaatgcctgatgcgacgcttgccgcgtcttatcaggcctatcttaaccgttggttaatttttcaaactcttcacacccggtatcaaacccttccatacagctcaggttcaaccagtgcagcgccttttgcttgttcttctcgataaaaccttcttcaccgtttaagaacatcattcccgcccagtactcggaataaccggttcgggaaattgcagagctgcgtttgaaataccaggttgccttgtcatcgtcggccttaatgcccacgccgttggcgtaaatcaaaccaagcagcatttgggcatcgacggcagagtcgttctccagatcttcgctggcgttttctaacaggctaattgcctttggataatccggtttacccgcttgagtatttaccagaatatgcgccagcgttacttcaccttctttactgcccgcttgcgccgctttctctgcaagaacttttgcttgtggatagtccagactgaccggattggtgattttgatctgcgccagcagcgcgcaggcatcagcatcaccgctgtcggcggctttctgtgcccaatattcggctttgctcaaatcgccggagctaaaccagctgtcggcaagaaaatattgtgcgcgtcggtccccggcctctgctgcctttaaatactggctgccaggctcggagtcgttggcgtgggcaaagaatgtcaaaaacaacatcaatgcgataatttttttcattttgataatacgattgggtagggagtaaccagtataaagagttcgaatggataaaaaaacagcctccgaaaggaggctgtagaaaggacggtattacgccagtgccgcttcgcgcaggcgagttttcaacttgttgtactcgtcaatcacgtactgctcggcggcgcgctgatcggcgatcggctcgacgcgaacggcgcagtatttgtactccggcgttttcgtaatcgggcttaagttttcggtaaccagctcgttacaggcaccaatccaccactggtaggtcatgtaaatcgcccctttgttcggacgatcgctgacctgcgcacgggtgataattttgcctttacggctgtgcacccaaaccaatgcctcatcttcaatacccagacgtttggcgtcttcggtattgatttgtgcgtagccaggttcatcagccagcgccgccagtgccgcacagttaccggtcatgctacggcaagagtagtgaccaacttcacgcaccgtactcagtaccatcgggtactcgtcggtgagtttgtcgattggcgctacccagtcgcaggtgaagaactgcgccagaccgttcggggtatcaaacttctctttaaacagataagaagtcccctgatcggcatcactagtatcgcggcaaggccactgaatgaagcccagttcgcccattttctcgtaagtcgcaccgtagaaatccgggcacagatgacgcaactcatcccagatctcctgggtgttgttgtagtgcatcggataacccatacgggtggcgatttcactgatgatttgccagtccgttttcagatcccatttcggttcaaccgccttgaagaaacgctggaagccacggtcagccgcagtaaacacgccttcatgctcgccccagctcgtactcggtaaaataacatccgccgcgctcgcggttttggtcataaagatgtcctgaacgataaccagttccagatcttcaaaggctttacgtactgcgctcagctccgcgtcagtttgtagcggatcttcgcccataatgtacgcggcacgcacttcgccatgcgctgcgcggtgcggcagctcgctgatgcgatagccggtatgcgctggcaggctttccacgccccaggctttggcgaatttctcgcggttagccggatctttcacgtactggtatcccggatacgtatccggcagcgcgcccatatcgcaggcaccctgaacgttgttctgaccacgaaccgggttaacacccgcatgcggcttaccgaggttaccggtcagcatcgcgaggctggtcagagaacgcacggtttccacgccctggtagaactgggttacacccatgccccacaggatggcggcgcttttcgcctgggcatacatccgtgccgcctgacgaatctcactggcgctgacgccggtgatatcttcaacgctctccggcgtgtagccttcaacgattttacgatactcttcaaagccttctgtacgactagcgacgaacgctttgtcgtacagattttcttcaataatgacatggcccatcgcattcaacagcgcgatgttgctgccgtttttcagtgcaatgtgcatgtcagcaatgcgcgcggtttcaattttgcgcggatcgcagacgataattttcgccccgttacgtttagcgttaattacgtgattcgccacgattgggtgggaatccgccgggttgtacccgaaaacgaacactaaatcggtattatcaatttcgttaatagcattgctcattgcgccattaccgacgctttggtgcagacctgcaacgcttgggccgtgtcagacacgagcgcagcagtcaacgttattggtaccaataacggcgcgcgcaaatttttgcattacatagttggtttcgttacccgtaccacggctggagccggtcgtctggatggcatccggaccgtacttctctttgatggcgctcaggcgctcggcaacgtaattcagtgcctcatcccaggaaacaggttcgagtttgccgccacgctggcgacggatcatgggggttttcaggcgcggggtcaggatctgggtatcgttaatgaagtcccagccataataacccttcagacacagggtaccctggttggttttcccctgcgctgcctccgcccggacgattttgccgttatcgacgaccaggttgattttgcaaccacttgcgcaataggggcaaaccgtgacgacttttttcatcggtctcgctccagttaatcaaatcacgcatacgcgctctcgactacagtatgcatcttttatgccacattttatgtggggtcattccctgatattacgggcactatttattcaaaactctgacgaaaaacaggctgtcgtcagttttgacgtgacgaaacgaaataccgcgtgacagccatcacgcggcagacattttattttttctcgacgacgggacctgcctgatacccgccgcccaggcttttcatcaactgaatgctttggatcacccggcggctgtccagcatcagtaaactcatctcttcggcaagcactggcaaccgggcttcggtggcctgtaagcggctggttaagccgcgctgataggcggcctcggcagcgcgctgggtaaagcgcgtggcttccacgcgttcagcctgcatttctcgctcgtcgttgagcgtttgcagacgcgtgccgttgacggcaacgtcacgcaccgcgttcagtacactctggttgtaacgttcaatcatcatgttgctggcggcgcgcgtgccttcgagattggcattcaaccgtccaccgtcaaacagcggcaatttcagacccgggatgaagttgaactggcgactggtttttttgaataaggtatgcagatggatggagtccagaccgaaaaacgctttgatatcaaagctcggatagaacaacgcccgcgcggaatccacctgatctaaactcgcctgaacataccagcgcatggcttgcagatccgggcgtctggcgagcaactcataagagagtgtcgccggaatgccggtctggacttgcggtaatgccaccggtctgatctccggcatatcgctggctcccgcgccaatcaatgcacgcagagattctcgcgtttcggtgatttgccctttgacggcaacaatttgtttatcgaccgccagaatctgtgcccgcgcgccgtggaaaggcacttgcgcttccagaccgtgcgccactttactctggtgcgctttcaccgcgtaatcaatcacatcgtgagtttgttctaacagatcgagcatctgatagctggcctgcatactgtaataaagctgcgctacgcccgtggccaggcttagctctactgctgcggtttctgccagcgcggcattatgcgcgccaatggcggcggcaaccgcactgcgatgcacaccccacaaatcaagatccagtccggcaaacaaacctactgtggcttccgtatagtacggcccgtccatacccagtgctggcgcatccatactataagggcttaaaaagccgttcgcgctgacacgttggcggttgagcatccctaacgctgcgacctgtaattgactaccggcatctaacaaatcggcctgggactgcgctttttcttcccgcagtttcgcttcggcgagggtgtgactaccacttagcgtccgttggatcagcgcatccagctgcgggtcattgagttgtttccaccactgcgcctgcggccagccggagctggcaagatgaatatcgtcggccagtttgatttgttccggtttgagctgttgatgaggtgcagaatccttacgtaccagggcacagccggaaatcagcgtcgtgctgccgagaatgctgcacaacagcagacgactaagttgacgattgatcattgcgtggctccttgtgcctgttccgtggcgggcgttaatgccggggctgtccagtctggcaagcgggcgaaaagctggcagacgtgttgctcctgttttaataaggtgggcaggatggcctgagaggcgggtgtctcttcaagcgttatttgaggagaacggctgagtgcggttgccagaccggcagcgtatttctccagggcgtcggcaaactgacctgctctgtccggctgtagtgcgttatccagcgcctgcgcgctgttccaggtggcatcccaggcgtgaagaagatcgcggccctgacgaataaccgtttggctacgttcaatcagtaatgcgcgttcttcgctgtccagttgacgctccagcgccacgcgttggcacatctcttcacaggcattaaacgccgcatgcagaccgatacgaatttgcagataagtgcgcagagccgtgacttcctgctggcgtgggatccgcattactttacttaacatacccagcgtgccagccagtttttgcggcagtgtgcgcgcttcactttcaggccagacaaaggtgtaaatcaccgcggacaccacggtaccaatgatgatacccagggcgcgatcgcgaatttccaccaggtcgtacactgggccaaaaacgttttcgagcgtggcgagcgcgaaggtgaccaccatctgtgtgccgatataagaagagcgttcagagctggtggcaatccatgcgcccaacaggaaaatcggtgccagcacaaacagcaattcgacaatattgtccagccagggcatgaccagtagcgtgaataacagcgccagaatcgcgccgcaaaaggccccgccaaaacgcagcaccatcttctggtagctgctaccgacatttgggttagcgacgatcacgcatgtcagcatacaggtgtgaatgccttcccagtccacgccgctgtaaaaggtgtaacagatcaaacaggcgagcagcgtttttaccgcgtagcgcatatagtctggattggtaaaagcatcggcggccatacttggcggtttggctgcgggcgttggcggcgtattcgggtccatctgacccagttgtaacaacgtctggcagatattctccaggttacattcccgtgccgccatcgcttcactttcactgatccgccagtcgctttgccagcactgaccttcagcaacggcatgctgcagcttgttgatttcactagctaatttttgtcggaattcaataattgcctgagaatcagcaaaagaggtgggatcgtagcgattcagcgtgctgtaaatgtaggttaccgttgccacgcagctttgccaccatgcgttttgagttcgccagttggcatcgtccgcgaggcaaaagacattgagtttttgtagcgccagcgcctctctttcaatccgcgtttcgggtagcggtgcgaggctgtctgtcaggtgactaatggcatcatcaagccgatcattaagcgcctgatgcatttggctaatggcacgactgggaaaccacagcacgccgattaacgtcatcagcaaggttggatagaggccaacaacgatacaccacagcgttaagcgcacgaccacttccggatagtcgagcatggcggggaaggtttgcccgtaaatagcgacaatggcgacggcgaaaaagaccagccccaagcgatgggtgcgcatcaaaaacatgcagcccatcaggatcggtccggcgatgatcaatcggatcaacggttcgccgtaactccatttgtagatcaaaaacaggctgccgatctccagcaccgtggcaaccacaaacaagatcgcgacaaatttggtgtaaaacgcgttgctctgaataccgtaaaacagcactgccaggcttaacgccacaaaagggatctcaaaggtcatgctgatcagaatcaccagcaggcagcctacccagagttgcacggtctgcggcacgcgacctggtcgccgctcgcttaactcttcatgaaagaacgccagcagcctgaccaccggtaatggcagggagttgagcgcgctcattattgcggctcaagattagcgactgcgctagcgccgatgcggaacatttccgggtcaggtttatcgaccatgattttgaccggaaaacgctgggcaacgcggacccagttaatagaacgagacactttcggcaggccgcccagcaccaggccgccgtcatccggtagcacgccgtagccaatgctatccactttaccctcgaaggttttgccgctgtcactcatcaggcgaatcgttgcgggtgtaccactgcgaatatttttcagatcggtttcgcggaagttggcgatcacataccagtgacgagtgtcgattagggtaaaaatagggcgcatggcagaagcaaattgcccgacggaggttttgagggaaatgacccggccatcaaacggcgcgcgaacggtcgccatttccagatgcagtttggtcagggcaatatccgcttcgaccgccgcacgctgggcaactaatgcatccacgccgctgacggcgctggcggcactctgcgcctgtaacaatacggcattaagatccgcttctgcggcgcgctgcgccgttcttgcacggtcaacatcttccgcactgacaaaaccttctttcagtaatggctcggtgcggcgtaatgtatctgtggcctgtttcgcggcggcacgggctttttctatcgtggcattaacgctgtcggcaccaaactgttgcgcgtcaacgctacgctgggtgagcataatttgcttatccagcgccgcgagggaggcttcagctttcgccagattggcttcgtacgggcgcgggtcgatgcggaacagcaaatcgccctgtttgactgcctggttgtcggtgaccgccagttctacaatgcggccgctgacttccggtaccacatcaatggtatctgcactcgcgtaagcgtcattagtacttggcgcactgtctacgcgccagataacgaaaacaagggcaaccagcgccaacgcaaccactaacagagcagggaatttactgcgaggagcttttttcggcgtactttccatgagcgcgtctcaaatagattagaaaaatgccagccagaacagcatggcgtagagagcaaaaagggcggtataaataattccgacaaatgccagattgatatttgcccgctgaataactcgcctcgtgatgagcgtcaaaataaggctggcaatggcgcagaaaaaccagctgggataataagcgccgatcaccgggattgccggagataatgagcatcccgaaaccatgaagacgggaattatccaggctgtttttttgagttgcatcgccatgcgagagagaactgttggcatattaaatacatcctgtctgctgcgaacaatatctgtagtgaatatcaatatccattgaaggcgtcagtatggctattttcttgatgaataaaaatagctttattcagccaccgcattcataacttatatattttatttattaattggctgtatatatttttaaaataaatacttttgggggcttcagcgcccccaaaagcgagtgacattaatttggggttacgatattcacccacaaatcgaaattatccagacaggcgataatttcttccagtttcgcgccattgccaataattttggctttcttcgcttttaccagatccgccattttggcttgtccggtcagcacggcgtgcagatcttcacggctgatgtagaaagaggcgtcggcttgcggttgcagcgttttccggtagttaagcacgctatcgttcagcgtcaggttgaggttatcgccgttgctcatattgaagttcaggctgatatttttacccgcagctttcgcgctatcgaggcgaacggccataaagtcgaacagcatttcgacgctcatcccgcgaatggtgtccggggaaccggtggtgccgtggctgaacttatgcaccccttcgcgcagctctttcgcgccggtcaggtagaaaccgcgccatgtggcggactcggcctgatagcccagctgttcaaagttattcgcttgcagattcttcgcgacctggtcacccgggttggcggcaatcacctgtttcagcagttctgcgctccagcggtaatcaccttgcttgttcgcttcttgcgccaggttgatgacacgggcagaaccgcccagcgcctgcacgtaacgtttacccatctccacctgaccatacggatgcaggttagccgggttaccgtcgtaatagccaagatagaagttatacaccgcgcgggcgttgtggctgacagaaccgtaatagccgcggctggcccagttattggcaagtgcaggcggcagcttaatcatgtcgccgatttcattcatggtgtagccctggttcgccaggtgcagggtctggtcgtgaatgtacttgatggtatcgcggtatttaccaatataatcattgatatgcttattgccccagaccggccaggtgtgcggcataaacagcacttccgcgtcgttaccccacatatccagcgtttcgttcagatactcggtccacttgctggtgtcgcgggttttcgcgccgcgcagagtgtagaagttgtgcagggtatgcgtggcgttctcggcggtacacagggctttcagggccggaatatagaagtgcatttcggctggcgcttcgctacctggggtcatcaggaagtcaaactccaggccgtcgataatcatcttctcgccagttctgacgatagttttcgtcggtgcaataatgctcgggtcgcccgttgccagcgtcacgccaaggccattacccacattgccttgcgcgttgtgcggcagtaacagaccgtaagagtagagcgcacggcggctcatgatgttacccgccagcacgttttcgctgatggcttcgtccataaagcctgcaggggcaatcacctgaactttgccggatttaacatcggcttcagagataatgcctttcacgccaccatagtggtcggtgtggctgtgagtgtagataacggcaacaatcggtttttgcggacgatgctggaagtaaaggtcaagtgcggcttttgcggcaggcggcgtcaccagcgggtcgataacaataatgcctttctcgccctcaacgaacgtaatgttagagatatcctggccgcgcacctgatacattttatcggtgactttgaacaggccagaaataccgttgatttggctctgacgccacaggctggggtttacggtttccggcgctgcggcattaatatcaaatttgtaatcgtccgcgcggtagtaaactttaccgttcgcatcacgcagaataccttcatccagcagcggggcgataaatccacgctgggcatcgtcaaaatcctgacgatcgctaaacggtaaacttttggcgtaattctgattaacctgttgggtatattgagtggcggctttcgcttcctctttcgcgttagcggtatttaccatcatgccgctggcggcagttaacgcaataacaatcctgctcaaacggaataaccgagagttattcatataaatctccatttatcatttatgtcgtaaatatgtaatccatgcaaaatacgtcatttaaagctggcgttatcataattgggaaattgcgactttaataagtggaagtgtgagcggaacgcgccattttattaggcatttgtgctgaagagggaaaattacagtaaaactatcattgcagaaaataatatgagtcgttttatgtgtttattatatatattgtacctgtcgttggcacagcgggacattgcgctactgtgccaacgttttactcatggggctttagcacagaactgtggcaaaaaacgttgatgcgccaatattgctgcaccctgagcgccattaaagtcagaagaactggcggcaataaagcgcacgacctgatgcggcagtggacggcgcaggtacttttgggtcatggcaacgagagtctcgcgtgggaaggcgggcatatccatcacgccaccgcccaggatcaccgcatcgggatcgaacagattaatgctggtggcaatggcccgtgccgcgttttcaagcagactctggacgaaaggggcgttttccgcatggacgaaaagatcgcgcaatgggtaatttcggggctgttgttcgtaccagcgtcttagcgccattccagagcaattggtttccaggcacccaggattgccacacgcgcagtgttgggtcatatctcccagggggatatgacccagttcgcctgccacaccgtgtgcacccgtccacggcgcaccgttcatccacactgcgaaccccatccccgtaccgagataggccgccagaaccagttgttgcgtaaggcggttttctactacgtcccaggagagttgcaggttaacgtcgcgggaaaactcaaccggacaattcagcgtattttcgagcttatcggcgagatcatataaatccgccgctgttaacggcaggttaggcgtagaaataatggtgcgtttatctttactgaccagcgccggaaatcccatcaccagaccatgacagcgagcgttaaagcgcctgagttgctcgtcaatcatttcgccgataccgctcaccaggccgggagcaatgacttctgcggtccgctttttttcgcagtgtagcgtttcaccttctgctgtccgcagacaaaagcggatatgcgttgcccccatatccacgcccgctacgacgttatgctgtttttgcatgaggctgtacctcgctttttgcagccagaatctgcgcggtcataattctccatgcttcgtcgatattttccgcatgattaaacaggccggaagtgccgacgataaagacatccgcccctgccgccatcagtttttcgtaagttgcctggttgcaggaaccgtccacctcaatttcgtactccagaccttctcgttcacgccatgccttcagttcggcaagtttatccagcatttcaggaatgaacggttgtccggcaaagccgggatcgacagtcatgaccgtaattttatcggccttatggatatagtatttcatggcctcaactggcgtctccgggttaaggatcagccccactttcatgtcatgacggcggatttcatcaatcaggcggaacgcctggccgttgatggtttccggatgcagagtgatgaaatctgctcccgcacgcgccagttgagcaatgtaatcctgcggccgcgtcaccatcagatgacagtcgagcggtttagttgccagttttttaacctgacttacgaagaacggactgagtgtcagattggggacaaagtgaccgtccatgatatcgatgtggaagtaatcggcatggctgtcgataaattcgatctgttctttaaatttcagcagatccatacacattaagctgggggagattttcatgttcaattccttacttactgataagacggtcaagggcgacagccgcgataattaatccgcccatcaccaccagttggtaataggtttgtacctgcaaaatattcagaccgttgttgatggtgccgatgatcaacccgccaatcaccacagagaaaatgcgccccttgccgccgaagaaactggtgccgccaatgatggcgctggcaatggcataggtttcaaaacccataccggcaagcggttctgcggcaccgagtcgtgcagtactgacgacgcctgccagacctgcacaaacaccggagatgataaacaccaccaggatgtggaatttcacgtcaatcccggaatagaacgcgctatttttgttgccgcccagtgcgtagatgttgcgcccgagccgcatacgcgttgtcagaaaccaaaggatgagcgcgacaattagactgaagataacggggacaggtatcccaattacgctggcggcaaagaagttcacgaagtcaaaactgaagccgtatacgctgttggcatcggagatcaccagcgtgatcccacggaaaatcgcgttggtgccaagggtgatgatgaacgggtgtagccccgtccagttgaccaggcagccgttgatcgcccccagtgcgccgccaaccagtacaccgccaatcatcgctgcgagaaacgggtcaacacctgccaacatcagtttggcggtcaccataccggaaagcgccagaatcgcgccaacgctgaggtcgataccagcgaccaggatagcgaaaaactcgcccatgccgatcaataccgtcacggagctttgaataaaaatctgggtaatattattggtggtcagaaaatattctggactcaggctaccaaagatggcgacgatgatcgccaggataaaaaaggtgccgtatttatcccagaacagcgcaaagttgaacggtttcttctcgctcgcttcgctttttactcttgtggtaaagcccatgccataatctcctcttcgctcatgtcatcgcgattcgtcaggatttgcgtcagtcgtccttcgcagaacacggcgatgcggtcgcagacggtgataatttcaggtagttcagaactcaccatcaggatgacttttccgtcgtccgccagttggcgcatcactttgtaaatttcggctttcgcgccaacgtcgatgccgcgggtaggttcatcgaaaataatcacttccgggcaacagcacagccatttggagatcaggactttctgctgatttcccccggagagttcggtgatattctggtttacgctatgacatttcagcgccagcagttcgcgttgattttcagcggtacgttgctcgtcaacttcatgaaacaagcccatcgcgcctttatagccgccgtctttcagactgcggctgatcgccatgttctgagcgatggaaaagttggggaaaaaaccgttatcccggcggctttcagtgatgtaagccatcccttttttcacggcatccaggggactacgtggagagatatctttgccattaagacggatttctccgccagcgcgtttatccacgccaaacagacaattcatcagttcagtacgtccggaaccgaccagtccggcaaagcctaatatttctccccggcagacgctaaaactgatatcccggaccttttttctgtcacgactggtgacgttccgcacctcaaaaaccgtttcgtgcgcaaggttgctgacattctccttcatcgcgttaaaacggttttgcagttcgcggcctaccatcagacggacgatatcgtcattactcacatcgcttactatgccgctgcaaacgctgctgccgtctttcatcaccgtatagcggtcgcaaatacggcgaatttccgccaacttatggctgatatagacgatggccgtaccctctttacgcaactgattcatgatcagaaacagatagtccacctctttattggtgagactggaggtgggttcatccatgatgatgactttggcatcgagcatcagcgttttggcaatttctagcatctgcttgtggctgatagataaattcgccactttctcatctagatcaactttcaagcccacgcgtaataacatcatggcggcgcggacacgcatttctcgccagtcgataatattgacgccacagatttttttcgtcagatgacgaccaatatataaattttccagtacggttaattcatcaataacgctgagttcctgataaataatcccgataccgagttgtgccgctaatttatgatccagcttgttatagctaatgttattaatggtaatggtgcctttggtcggctcatgtattccggataaaactttcattagcgtggatttacccgcgccattttctcctagtaatgcatgtatttcaccaggataaaccgttaaattaacgctctttaatgcgtgaaccggaccaaaggacttgccgatccccgccatgcttatatatggcgtggccataaataacctctctgcacgaaatatcgtattattgcctgatggctacatttatcaggtctacgttcaggttattttgttggccggataagacacttcattagcatcatcatccggcatcattcagttttattgagtgaccaggatactatcgaccagtttaaattccggtgctttatccagcgggataaccttgccggatttctcagcgtcaaccatcagcttcagacccgttgcgccgatatccgccgggttctgggcaaccgtcgcggtcatttgtccggcttccaccattttgcgggcttccggaatgccatctgtaccgacgaccagcacttttcccgtttttccggcgtttgcgactgcctgagcaacacccattgccatcgtgtcattcgcgcaatagatcgctttaatattcggattacgttgcaacacgttagtggcgacatccagtgctttaatgcggtcccagtcggcaggctggctggcgacaagcttgatctggcttgcttttttgaaggcttcggtggcaccattacgacgcgcttcaccggaggcgttaccggctttaccctcaatgattgcgacttcaccaccttcagcgcccaatttgtcaataatgaagctcgcgcctttcgccccgacagcaacgttatcggtggtgacaaaagcttccacattgccgccagcttttttcagattatccatgtcgattttttcatcgagattaaccagataaatgccttttttccatgcgcgggcgacaggcatgaccagattcacactggataatggagcgaaggcgatacctttgtaatttttattactgagatcttcaaataactgcaattgagattgaaaatcgccttcactaggagaggcaaaaatatcaacgctgacgcccagtgtttttgcttcatcttcaatgccttttttcatatctacccaaaatgggttggagagggttttcaatacgacagcatattcggcggcagcaaaagcgctggtactcaacattaagcccacgagtgtgccgctgaaatatttcagatatttattcataataatgttctcacggtaaggggacaggtaactccgcgatggcggaattacctttttcttatttcagcgcgcctggactgaagaaatcaacaattgcgccggttttttgcatattaatattagcttgttcaatgttgagctgggcgacagagacaaaaaaagcgtccagcaaagttagttgtaatattcttgcgctggcattacgacctaataacggcgtttccggggctggactgcaaataatataatcggccagtttcgctatcggactatggtagctatgggttatacaaataatctttgccccgttcttttttgccagttctacggccgcttttacatcactggttcgcccggaatgggtcactaccagcacaacatctccttcctgtaacaagctagcggacatcatcatgatgtgagcatcaggataggcctgacagcgtacgccaatgcgcaagaacttgtgctgtacatcagcacagatagcattacttcctccggcaccgtacaaatcccgctgtctggcctgatagaaaaagcgggcggcacggtggatctcatcaacgttgacgatgctctgaccttccataatggtgcgtaaagtgatgttaaataccttattcaccacatcctgcggcgcttcatcaaaagccaactcggaaggcaatacctgttcactctgagaaaaataatcttccagcgcactgcgtaagttacgaaagccgctaaaccccagcagcttacttaccttaactatcatcgcttcagataccgccagagcttctgcgacatctttaattgcgggtgcacaactcaggttaccgggtttgagtaaccactccacgatgcggctttcattttctgtcattccttcctgcttcattcgcaggtaaggcgctaaccctataccgttcggaagcgcactatcaaactcactctggctcatcacgttctcttgtccttgaattgaagacgccactatatcaccacagcaagaacagaaaagatgctggcgacttcacaaaaaaataaaatttataaagtttattttattgtgaacaatggcgagtggcttaaaattttatttcatttaattagtttaaaaacatgatgttatttgtttttctggttttttagatgatagatgttgctggatggtgagtgtctttaacgctattgcgctgtcagatgtaactctgtaaaacagatcaggaaggcgtaattcatcgattttgggtgtttttaattcattaacatcacaaatgttttttgattgtgaagttttgcacggacggggaagatgaatgaaaaagattgcatttggctgtgatcatgtcggtttcattttaaaacatgaaatagtggcacatttagttgagcgtggcgttgaagtgattgataaaggaacctggagcagtgagcgtactgattatccacattacgccagtcaagtcgcactggctgttgctggcggagaggttgatggcgggattttgatttgtggtactggcgtcggtattagcatagcggcgaacaagtttgccggaattcgcgcggtcgtctgtagcgaaccttattccgcgcaacttagccggcagcataacgacaccaacgtgctggcttttggtagtcgagtggttggcctcgaactggcaaaaatgattgtggatgcgtggctgggcgcacagtacgaaggcggtcgtcatcaacaacgcgtggaggcgattacggcaatagagcagcggagaaattgagattcatccactacttgcatggatgagtaatgattaatgtggatagagtttctttttgaggttggctaatgaaacgctttccgctatttcttttattcaccctgctcacgctgtccaccgttccggcccaggccgatattatcgacgacaccattggcaatattcagcaggcgattaatgacgcttataaccctgaccgtgggcgagactatgaagatagccgcgacgacggctggcagcgtgaagtgagcgacgatcggcgcagacaatatgacgaccgccgccgccagtttgaagatcgccgcaggcagctggacgatcgccagcgccagcttgatcaggagcgtcggcaactggaggatgaagagcggagaatggaagatgagtatgggcgatgaggttgggtatggagcaggcatcgcccctcaccccaatggggagagggagaaaacgagcgcaatattcaatatcgagcacaatcggtcccctcgcccctctggggagagggttagggtgagggggccagcgcgcacattccctctcatcacgccaccccaatctccatcccatcaaaccccacctcaaacccactcggtagtgcgttttccatcagccacgcatcaaactggtggctgatatgggtcagaatcacccgtgggctgcggataacctgattcagcgcaagcacggtatttaaatcacagtgattacgcggtgcatccgcgcgcggcgggtgactgcaatccatcaccattacctgcggctgattattgcgtaaaaatttcagcgttttttccggcaagcctgcggtgtcagacagccacgccacccggctgtgtgccgtttccagcagataaccgaaggtcagtttactgtggttgagcggcaggggcgtgacctgtaacccctgcaaatcaaacaccacaaacggttccaccgtgtggctgaaatcaagcaggcccggatgtttaaacagatcgtcgcagccctgttcatccggcgggccgtaaaccgggatcggatcgccaacgccccagcgcagcggaaacagcccctggacgtgatccatatgataatgcgtcagcaaaaactgctggaagcttccggggctccagcgatcggcgagatcgtgcagcccggcgtcgatcagggtgattgcgtcgttaaacttcactacgccgctgcacggttggcggcgatactgcgggctgcgccgcgctctggcgcaggccgcacactcgcagccccatgccggaacgccctgtgcgccgccggtgccggtgagcgtgagggtcaggctcatgttacagcgccttggtgaagcggaagtggctctgctcgtagccttcgcgcagatagaaacggtgcgcgtcgtggcgcttcacgttggtgctaagttcggtcatttcggccccggcctggcgggcttcttcttctgcccacgccagtaacttactgccgacgttcagaccgcgcgcctgcggcattaccaccaactcctgaatttcgccgatccagttgacatgatgcagatgaaactgcaaatgcaggccgatcatgccgacaacttcgccatcaagcagcgccagatggtagcgcatgtttgggtcgcgcagattggcgttaaaacccacgcgaaacgcgtggtggtcaaactccgcctgttttagctcacaaatcagcgcgtaaaccgcgtcggtgtcgtactgcgtggccgggcgaagctcacaagcaggcatggtgtttctccttctgatggatcagcgtcagcagcgtgtcgacgctctggcgcaggctgccgtcattgttgagcgtatggcaatcctgtggagtatagcgggcggcgcgcgccaggcgggcgttaatttcactggcgttttcacggccacggttttccaggcgctggcggaggatctccgggctaacctgtaaacagacgggcagcagcgcgctttgatagcgcgcccgcgcctgcggcagatgggcgcgactgccgttgaccagcacgtcgaatccggcgtgcagccagagatcaatctcgacgccgacgccataatacagaccgttagcgtgccagcttaaggccaacagattttgccccgcgcgggtaaaaaactcctgctcgctcagggcgatatggttttcacttccggcgctggcatcgcgcgtgatgtagcgatgcgccaccagtaactgagtttgttcccgcaggcggagttccgccagcaggctgtctttcccggagccggacggccccattaaccaaatcagttttcccatcatcagaacacccttttaccctgacgccagacgtggtcgatatgaatatgattgtccttgcgatgcgccagcaccaggtcggcgcgtttgccctcgccaatcaccccgcgatcctggagattaagcgcctgcgctggatttttagtcaccagcttcaccgcctgcggcagcgtaaagcggttgctctggtcatcggcgacgcgaaatgccgcatcgagcaggctggcggggtagtagtcggaagagaggatatccagcaggccaagctgcgccagttcactggccgccacgttgccggagtggctgccgccgcgcacaatattcggcgcgcccatcagcacgttcatgccatgcttgcggctggcttccgccgcttcgaacgtggtgggaaattcggcgatcacgctgccaagctggtgagattcagcaacgtgggcgtgggtggcgtcatcgtggctggcaagcgcaatttttcgcgcgcggcacagggcggcgatggattcgcgattcggctggctccagcgtgcggcgagcgccagttgctcttcttcgtactgctgcatctgcgcatcagtgagggagtatttgccctgataatattcgcgatacttctcgcggttggcgaactggcgctggcccgggctgtggtccatcaggctcaccagcgtcaccggctcgcgctgcaccagtttttcaaacagcggcagcgtggtgtgatgcggcagttcgcagcgcagatgcagacggtgctcggcgcggttgacgccgcgtttctgcgtctcttcgatggcgttgatcatcttctccagattctccagccgatcgccgccgtcgcgcacgtcgccaattgccacggcatccagtacggtggtgatgccgctcgccaccatcagcgcgtcgtggctgctcatcgcgctgtgggcaggccagtcaactttcgggcgcggggtgaagaatttatccagattatcggtatgcagctcaatcagccccggcagcagccagccgccttcgccgtccatcgcctccggcaggcggctctggctttcggcaaaggcgcggatttcgccgttctgcacctccaggctaccgcttaccacctcgttttccagcaccagcttaacgttattgataatcatgaagaggctcccattgggtgttagctcaactagaggctcccattgggtgcaggcggtcggcgacgtcattacgtacagcttcgtcatggaagatgcctacgatggctgcgccacgggttttggcttcgcgaatcagttccaccaccgcggcgctgtttttggcgtccaggctggcggtaggttcgtcaagcagcagaatggggtagtcgacgataaagccgcgggcgatgttgacgcgctgctgttcgccaccggaaaatgtgcttggtgccaggtgccacaggcgttccggcacgttcaggcgggtgagaagacgcgcggctttagcggcgcaggcttcacgcggaacgccggtatcgagcagcggctgcatcaccacttccagtgcactgatacgcgggatgacgcgcagaaactggctcacccagccgacggtggttttgcggatttccaccactttgcgcgctggcgcggtgaccaggtctacccactcgtcaccgtgtttgatctggatttgaccttcgtcgggcagatagttggcgtacaggctgcgtagcagagtacttttgccgctgccggaatggccgtggagcaccacgcattcgcccgcgttgacggtgaggctggcgcgattgaggacgggcaggcgcacgccgttttgctggtgcaggatgaaggttttactgacgttttgtacgttaatcatttttcgcctcgtggttcgggtgtcggatgcgacgctgacgcgtcttatccgacctacggggagcgcatttgtaggccggataaggcgtttacgccgcatccggcaccggctcaattctgcaaaacgctactcaccagcagctgtgtatacggatgatgcgggtcgtcgagcacgcggtcggttaacccactctccaccacttgcccctgcttcatcaccagcaaacggtccgccagcaggcgggcgacgcctaaatcatgggtgacaatcaccaccgcgaggttcagctccaccaccaggccgcgcagcaggtcgagcaggcgggcctgcacgctcacatccagcccgccggtcggttcatccataaacaccagcttcggatgcgtcaccaggttgcgggcaatctgcaaacgctgctgcataccgccggaaaaggtggtcggcaggtcgtcgatccggttggcgggaatctccacctcttccagccacttctgcgcggtggcacgaatatcgccgtaatgacgtgccccggtcgccatcagccgctcgccgatattgccgcctgcgctcacctggcggcgcaggccgtcgagtggatgctgatgcaccacgccccattcggtacgcagcaggcgacggcggtcggcctcgctcattgcatacaggctacggttctcgtagtgaatttccccctgctgcggcgtcaggcgcgcggagatgctcttcagcagcgtggtcttcccggagccggattccccgacaatgcccagcacttcccccggccataaatcaaaagagacatcgctaaagcctttgcccggcgcgtaaaggtgggtcaggttattgacgctaagtaacggttgattcattggttttttgcctcgctctgttggcggcaataatcggtatcggagcagacaaacatgcggtttccggcgtcatccagcaccacttcatcaagatagctgtgggtgcttccgcagatggcgcatggctcatcccactgctgaacggtgaacgggtgatcgtcgaaatcgagactttccacgcgggtaaacggcggcaccgcatagatgcgcttctcgcgccccgcgccgaacagttgcagggcgggcatcatgtccatttttgggttatcgaatttcgggatcgggctcgggtccatcacgtagcgcccatttaccttcaccggataggcgtaggtggtggcgatatgaccgaagcgggcgatatcttcatacagtttcacctgcatcacgccgtactcttccagcgcgtgcatggtgcgggtttccgtttcgcgcggctcgataaagcgcagcggctcggggattggcacctggaagataattatctgatcttcggtcagcggcgtttcggggatgcggtgacgcgtctggataaccgtcgcatcgtccgtacgttccgtggtgtttaccccggtcacgcgcttgaagaagttgcgaatgctcacggcgttggtggtgtcatccgcgccctggtcaatcaccttcagcacgtcgctttcgccaatcacgctggcggtaagctgaatgccgccggttccccagccgtacggcatcggcatctcgcgcccgccaaacggcacctgataaccggggatcgccaccgcttttaagatggcgcggcggatcatgcgtttggtctgctcgtcgaggtaggcaaagttgtagccgctcagattagccatggttctgctcctgttgcagacgtttgagtagctccagttcggcctggaaatcgacgtagtgggggagtttgaggtgactgacaaagcctgcggcttcgacgttgtcggcatgtgccagcacgaactcttcatcctgcgccgggcctgtcgcgtgctcgccgtactccggggcttgcagagcgcggtcgaccagcgccatcgccatcgctttgcgctcgctcatgccgaacaccagcccgtagccgcgcgtgaagtgcggcggctcacccggcgggtcgataaaaccgttaaccatttcacactcagtcatcagcagttcgccgacgttcaccgcaaatcccagctcttccggcacaatgctcacgtcgatatagccgctgcggatctcgcctgcgaacgggtgattgcgcccgtaaccgcgttgggtggagtaggccagcgccagcaaatagccttcgtcgccgcgcatcaactgctgcaaacgggaggagcgactgcaggggtaaaccggcggcgtgcgggtgatgtcatccggctgtgcgccgctatcctcttcaaacttcgccagcccctgacgcgccagcaggctgaaaacgtgcgggctcggctgctgttcgctgtcggcggtggtcagcgtcggcgcttcgccgtttgccagcagggtaaaatcgagcaggcgatgggtgtagtcgtaggttgggccaagcagctggccgccgggaatgtctttataaacggcggagatacggcgttcgagacgcatcccggtggtgtcgagcggctcgcttaccgccagcttcgccaacgtggtgcggtaggcgcgcagcaggaaaatcgcttcaacgttatcgccgctggcctgtttcagcgccagcgccgccagttcgcggtcggcaatgccgccttcggtcatcacgcgatctaccgcgaggttaagctgctgttcaatctgggcgacgctcagttcgggcaaatcggtatcgcctcggcgtcggctctcttgcagggcgtgggcggcgtcgatcgccttctcgccccctttcacggcaacgtacatcagcacacctccacatgagtggttcgcggaatagccagcaggcgctcgccacaggtcaggatcaggtcgatgccgagcgggaacggatgcgggcgctcggtgagttcgtgcagaatgcactccggcagctgcggagcgatcattcgttcttcggcaatacccgcaccagtaaggcgcaacatgcgtccgccgctcaggctggcgacctgtaaaatcagcgtcgcacccgcttccggcgcaacggcggtgccggtggaaagggcgttgagctgttcgctggaaatcgcctcatccgtcaccgcgaaggtcgcctgttccggctggctgaccagcggcgcgttggtatgaaaacgcaggctctggttgacgatatcgttatttaatggggtagaaagccacaccggcgtgtcgttatcggccagcgtcagcagcacgctggtggtggcgatattcagcggttgccagccgcgtttgagctgatgcagggcgacaatcacgcccggctcgctcatggcctttaacaggcgacgaaaactgtgctgggcatcctgcacgggaagcataaaagcggtttccagggtcatgcgttgtctccgcgaaccatcgtaaagaagtcgacccggctggcgttcacttcggcctggcgtgcggcaatgcgtgccatacggtcagcgtccagcggggcaataagggtttcacttaagttttgaaagtggcgagattgctgcatcagcgcgtcaatcagcgcgcagcgttcggcgtgctgtttatcacgcccctgcacccagctgtagccgagcgtgccgtcagtcaggcgcacggcggcgcgggtcagcgtggcgtcgccggcaaaaaaacgttcgccggtgccgcccatccgcgcctgaatctgtaccaggccagtttcagcggcgcggatcacctcatagtcggcggtgatgtttagcgcgttcaggcgtgctgccagttcagccggttggctgtgcgccagcacggacatccagtgctggcgggtcgcggtatctgcgtgcattcagtgctccatagtgaattcaatcatgtcggcgcgcgtcaggctgacggagtactccgccgggctgctttcaccgtcacggtggttaagggtgcgcacgcacagcagcgggctcatattcgggatttcaagacgctggcactctttggcctgggcgcggcgggcgctgatccgcgtctggctgcggcgcagcgcaattccggtttgctcgcgcagaaaatcgtgcaggctgccgctgtcgaagcgttgcagcgtcggccagagggtgaggtccgcgaagtagtggtcgattaaacagagcgcgacgccgttgacacgacgcagggtgcgcaggtggatgacgttctccccctcggtaatccccagtgcgtcagcgacgtggccggacgcggggcgcaatacgctaagcagtttttcgctggtgggatggctgccctgatccagcagattctggctaaaacgcgcctgggcgttgagcgggtaatcgaacgggcgcatcagcaccagcacgccgacgccctgacggcgctgtacccagcctttttccaccagttggtcgatggcgcggcgcagggtgtggcgattcacctcaaagcgcgctgccagttgctgctcggcgggaagatagtcgccgcagcggtagtgttgacgaagctcctgctcaagttttgcggctatctcttgatagcgtgttgggtagctggtcggatgtgtagacaagtgcatagatatcaatgcctcgcttatcagataaagtgcttacgcaaccgttgagagaggaaatccagcaggctgaccgtgacgatgataagcaccatcagggcgcaggtttgttggaactggaaaccgcgaatcgcttcccacagggtgacgccgatcccgcctgcgccgaccatgccgacgacggtcgccgagcggacgttggattcgaagcgatagagggagtaggagatcagcagtggcatcacctgtggcagcacgccgtagaggatctcttcgagcttgttggcaccggtggcgcgaatgccttccaccgggccgggctcaatcgcttccaccgcttcggaaagcagcttggagagcacgccggtggtgtggataaacagcgccagcacgccagcacgccagcgaacgggccgaggccgacggcgaccacgaacagcatggcgaagaccatttcgttaatggcgcggcaggcgtccatcaggcggcgaacgggctggtaaacccaccacggcaccaggttttcggcgctcatcaggccaaaggggatggagagaaccaccgccagcgcggtgccccagacggcgatttgcagcgtgacggccatttcggtgaggtaatcctgccactggctgaaatcgggcgggaagaagtcggcggcgaacgtcgccatgttgccgccgtctttgatcagcgtaagcggggccatttccgcgccctgccacgagacgaccaacacggcgagtacaacggcccagctcagaagcgagaaccagctgcgcttgggtggggcgatggtgatggtttgcatgtttggctccggtctgtaggccggataaggtgcttgcaccgcatccggcatcaacgcctgcacattgtcggatgcgacgccggggcgtcttatccgacctacgatttactgcaccgctttactcacgctactcatcgcgcttagcgcgttgttcaggcggtccaggtcatccagctgcgcctgaatctcggtggtttttgccagcttgtcctgctcattcagtcctttattgcttttcacgccctgcatctctttaaacagcgcgagctggcgaatcggcaccagttgcaggtcgctggaagcgcggaatggcgcccagcccaggcgttccagcaccgctttttcttccggcgttttgccgtagttcataaagaagtcgtagatcttgtctttggtggtttcggaaagattcttgcgccagacgatcggatcgcctgggatcagcgggctcttccagatcaccttcagttctttcagcttctctggcgcggaggttttcagcttgtcgaggttttcggtgttgttggtggcaacatccacctgcttgttggcgacggccagcgcgttggtttcatgcccggcgttgacggtgcgcttgaagtcgctggcggagatattgtttttggcgaagacgtagtagccggggacgaggaagccagaggtggagttaggatcgccattgccaaaggtgagatctttccgcttcgccagcagatcgttcaggttgttgatcggactgtctttgttgacgatcaacacgctccagtaacccgggcttccatccgccgcgaccgtctgggcgaagacctggccattggcgcgatccaccgcttccatcgcgctcagattgccgtaccaggcgatatccactttattgaagcgcatcccctggataatgcccgcgtagtccggggcaaagaaggcgttgaccttcacgcccagcttcttctccatatcctgcaagaacggcgtccattgcggtttcaggttttgctgactttccgtactaataatgccgaaattcaacgccttttcctgctcttcggcgtgcgccgggcttaacagggtgctgaggctgaacatgctggtgaaggccaggctggcaattatcttagcgttcattcgttttcctcaatgatggggatgtcaggcagctttcgcgttctcttcgacgcggttaatgctgcggtagagatggtcaaaacgttcgttatcaaactgttggctgctgccgtcgtagaagacgtgcccctggcgcagggcgacgatgcgttcgcagtagcgcagggcgtaatccacctgatgcagcgtgacgaccacggtgatgccgtcgttctggttgatgtcgcgcagggtgtccatcacgatgcgcgcactttctgggtccaggctggcgatgggttcatcggccagaatcactttcgcctgctgcatcagcgcacgggcaatcgccacacgttgctgctggccgccggagagggtggaaacgcgctgatgggcaaaatgcaccatgccaacgcgggtcagcgcctgtaacgcgcgctgtttctgctcgccggtgaaccagctaaaacaggtgcgccagaacggcgtgctgccgagcgcgccaatcagcacgttctccagtacgctcaggcggttcaccaggttgaattgttggaatatgtagccggtatgggcgcggcttttgcggatatcgcgggccaggcggccttcgcgctggactgtgcggcccagcagctcgatatggctaccgacagatttatcgccggtaatcaaaccgcttaagtgacgtaaaagggtggattttccggaaccgctcggcccaagcagagccaccatttcaccgtgatgaatgttcagatcaaccgcatgcagcgcctgatgctgattgaaggttttggcgagcttctcgacacggataatcgtttgcatgatgcagcctccctaaaaaagtggctccatcgtggcggattattgtgacgatttggttaattaaaagtgactaacagatgaagagttaacgggaattcgatgacagtgcgggagggcgggcctcccggcgggttattgcgttggttgttgtttgacgacattaatcatccacggtacgccaaatttatcggtgactttgccaaagccatgcgcccagaaagtttcctgccaggccatttcgatttttccgttagcggcaagattgtcaaaccagcgttttccttcttcgacctgttggctatcgagcaccagcgtaaagccggagtagctggcttttccactcggcatggcatcgctcatcatgatgtcgcttccggcaatgcgcacattggcgtgggcgatggcggtatcgggaaattgcattccggaagggcagttctcggcgctgtcctgcgcactttttggcatttcgccgaagctgattttatagagcagttccgcgcccaacgtacgttgataataggcaatcgcgtcggaacagttaccggcaaaagagaggtagggacttaacggcatgatggtgacctcagttaagagaagccagttaagtgtagttcgaaatttatacagatgagaggcggcctgataagacgcgcgagcgtcgcatcaggcagtcggcactgttgccggatgcggcgtaaacgccttatccggcctacggagggtgcgggaatttgtaggcctgataagacgcgcaagcgtcgcatcaggcagtcggcaccattgccggatgcggcgtaaacgccttatccggcctacggagggtgcgggaatttgtaggcctgataagacgcgcaagcgtcgcatcaggcagtcggcaccgttgccggatgcggcgtaaacgccttatccggcctacggatggtgcgggaatttgtaggcctgataagacgcgcaagcgtcgcatcaggcagttggcactgttgccggatgcggcgtaaacgccttatccggcctacggagggtgcgggaatttgtaggcctgataagacgcgcaagcgtcgcatcaggcagtcggcaccgttgccggatgcggcgtaaacgccttatccggcctacggagggtgcgggaatttgtaggcctgataagacgcgcaagcgtcgcatcaggcatctggcaccgttgccggatgcggcgcgagcgccttatccggcttaccgatcacaatacaatcagttctttttcacaaactcagatttcagtttcatcggaccaaaaccgtcgattttgcaatcgatgttatggtcgccttcaaccaggcggatgtttttcactttggtgccaattttcagcatgctagagctacctttcaccttcagatctttaatgatggtaacgctgtcgccgtcagccagcagattgccgttagcatctttaacgatcagctcgtcgctttcctgtgcaggttctgcgtcgttccattcgtaggcacattccgggcagatgtacatgccgttatcttcgtaggtgtattcggagttgcattttgggcagtgtggtaaactcatgtggatttcctcaaaagtcagcagggcaaaagcgccaaaaaacggcagattgccgaaaaaggccgcaattatacacaaaatccctgagtttgtcgggggtactgctgattttagacgacgatcgttttcatttgaaaggaaacgcaaaaagaaaataatctttttgcctctatttattatttaagataatgttaatgctctacttgttctttttttaattcacatgatatttttatctttctgacgttttaaacgtatcagaagacgttatttattctgataaaaaacaacacactaaatataaaattatttcttgcagtaattataaaagccgaaaacagaactcaaaaacaatctggctaaataaaataacaaaatttgctttaaggaagaattttctatgtacacacagaccctgtatgagttaagtcaggaggctgaacgcctgttacagctttctcgccaacagttgcagttactggaaaaaatgcctctctctgtacccggagacgacgcgccacaactggctttaccctggagtcagcctaatatcgccgaacgtcacgcgatgctgaataatgagttgcgtaaaatttcccgactggaaatggtgcttgcaattgtcggtaccatgaaagcagggaaaagtaccaccattaatgccattgttggtacggaggttctgcctaatcgtaatcgcccaatgactgcgctgccgacgcttattcgccatacgcccgggcaaaaggaaccggtactgcattttagtcatgtcgcgccaatcgattgtttaattcaacaattacaacagcgcctgcgtgattgcgatattaagcatctgaccgatgtgctggaaatagataaagatatgcgtgcgcttatgcagcggatcgaaaatggcgtcgctttcgaaaaatattatctgggtgcccagcctatttttcattgtctgaaaagtttgaatgatttagtgcgactggcgaaggcgctggacgtcgattttcctttttctgcttacgccgccattgagcatattcccgtgattgaagtggagtttgtccatctagcggggctggagagttatcccggtcagttgacgttactggatacccccgggccaaatgaagccgggcaaccgcatctgcaaaaaatgcttaaccagcagctggcacgcgccagcgcggtactggcggtgctggattatacgcaactgaaaagcatctccgatgaagaggtccgtgaggcgattttggcggtggggcaaagcgtgccgctgtacgtgctggtcaataagttcgatcaacaggatcgtaacagtgacgacgccgaccaggtgcgggcactgatttccgggacgctgatgaaagactgtattacgccacagcagatatttccggtgagcagcatgtggggctacctggcgaatcgggcgcgctatgagttagccaacaacggtaagttaccaccgccagagcaacaacgctgggtggaagattttgcccatgccgcgcttggcaggcgctggcgtcatgccgatctggcggacctcgaacatattcgtcatgctgccgatcagttgtgggaagatagcctgttcgcccagccaattcaggcgttgcttcatgccgcttacgctaacgccagcttgtatgctctgcgatctgccgcgcataaactgttgaattacgcgcagcaggcgcgggaatacctggattttcgtgcgcacgggttaaacgtcgcttgtgaacaattgcggcaaaatatccaccagatcgaagaaagtttgcagctattgcaactcaatcaggcgcaggtgagcggcgagattaaacatgaaatcgagctggccctgacctccgccaaccactttctgcgtcaacagcaagatgcgctgaaggtgcagttagccgccttgtttcaggatgatagcgagccgttaagcgagattcgtacccgctgtgagacactgttacagacggcgcagaacaccatcagtcgcgactttacgctgcgttttgccgagcttgaatccaccctttgccgggtgttaaccgatgttattcgccccattgagcaacaagtcaaaatggaattgagcgagagtgggtttcgtcctgggtttcattttcctgtttttcacggcgtagttccccacttcaacactcgccagctgttcagtgaagtcattagccgccaggaagcaacggacgagcagagcacgcgtttaggcgttgtgcgtgagacttttagccgctggttgaatcagcccgactggggacggggaaatgagaaaagtccgacagaaacggttgattacagtgtgttgcaacgagcattaagcgcagaagtcgatctctattgccaacaaatggctaaagttctggcagagcaggtcgatgaatctgttacggcaggcatgaatacttttttcgctgagttcgctagttgtttgacggaattacagacgcgtttacgcgaaagtctggctctgcgtcaacaaaatgaaagcgtggtcaggctgatgcagcagcaattgcagcagactgtgatgactcacggctggatttacaccgacgcccagctgttacgcgatgatattcaaacacttttcacggcagaacgatattgaccaagacgttacttgacggccccggtcgcgtgctggagagcgtttatccccgctttttagtggatctggcgcagggtgatgatgcccgccttccacaagcccatcagcagcagtttcgtgaacgactgatgcaggaacttcttagccgtgtgcagcttcagacatggacgaacggcggcatgttaaatgcgccgcttagcctgcgtctgacattggtggaaaaactggcgagcatgctggatcccggtcatctggcactgacgcagatcgcgcagcatctggcgctgctgcaaaaaatggatcaccgccagcactctgctttcccggagctcccccagcaaattgccgccttgtatgagtggtttagtgcccgttgtcgctggaaggaaaaggcgttaacgcaacgaggcctactggtgcaggcaggtgatcagagcgagcaaatttttacccgctggcgtgctggggcgtataacgcctggagcttgcctgggcgctgttttatcgttctggaggagttgcgctggggggcatttggcgatgcctgccgtctgggaagcccgcaagcggtggcgttgttgctgggtgatttgctcgagaaagcgacacaacatctggcagagagtatcaatgcggcaccgaccacgcgtcactattaccatcagtggtttgcctctagcaccgttccgacgggcggggagcatgctgattttttaagttggctgggaaagtggaccacggcagataaacaacccgtttgctggagtgtgacccaacgctggcaaactgtcgcgctggggatgccacgactctgtagtgcgcagcgtctggcgggggcaatgctcgaggaaatcttctctgtaaatttggcgtaaataatcagttacatcaatgagtcctaaacgaaatccatgtgtgaagttgatcacaaatttaaacactggtagggtaaaaaggtcattaactgcccaattcaggcgtcaactggtttgattgtacattccttaaccggagggtgtaagcaaacccgctacgcttgttacagagattgcatcctgcaattcccgctccccttttgcggccgtcgcgctgatttttctggcgtttgcggaaatgggccaactctgcgaggaaagctatgctgaaaaggaaaaaagtaaaaccgattacccttcgtgatgtcaccattattgatgacggtaaactgcgtaaagccattaccgcagcaagtctgggtaatgcaatggaatggttcgattttggtgtttatggttttgttgcttacgcattaggtaaagtttttttcccgggggctgaccccagcgtgcagatggttgctgcacttgccactttctccgttccctttctgattcgaccgcttggcggactcttctttggtatgttgggcgataaatatggtcgccagaagatcctcgctatcactattgtgattatgagcatcagtacgttctgtattggcttaataccgtcctacgacacgattggtatttgggcaccgattctgctgttgatctgtaagatggcacaaggtttcagcgtcggcggtgaatataccggggcgagcatatttgttgcggaatactcccctgaccgtaaacgtggctttatgggcagctggctggacttcggttctattgccgggtttgtgctgggtgcgggcgtggtggtgttaattagcaccattgtcggcgaagcgaacttcctcgattggggctggcgtattccgttctttatcgctctgccgttagggattatcgggctttacctgcgccatgcgctggaagagactccggcgttccagcagcatgtcgataaactggaacagggcgaccgtgaaggtttgcaggatggcccgaaagtcagctttaaagagattgccactaaatactggcgcagcctgttgacatgtattggtctggtaattgccaccaacgtgacttactacatgttgctgacctatatgccgagttatttgagccataacctgcattactccgaagaccacggggtgctgattattatcgccattatgatcggtatgctgtttgtccagccggtgatgggcttgctgagtgaccgttttggccgtcgtccgtttgtgctacttggtagtgttgccctgtttgtgttggcgatcccggcgtttattctgattaacagtaacgtcatcggcctgatttttgccgggttactgatgctggcggtgatccttaactgctttacgggcgttatggcttctaccttgccagcgatgttcccgacgcatatccgttacagcgcgctggcggcggcatttaatattagcgtgctggttgccggtctgacgccaacgctggcggcctggctggtcgaaagcagccagaatctgatgatgcctgcctattacctgatggtagtggcggtggttggtttaatcaccggcgtaaccatgaaagagacggcaaatcgtccgttgaaaggtgcgacaccggcggcgagtgatatacaggaagcgaaggaaattctcgtcgagcattacgataatatcgagcagaaaatcgatgatattgaccacgagattgccgatttgcaggcgaaacgtacccgcctggtgcagcaacatccgcgaattgatgaataagctgaaacggatggcctgatgtgacgctgtcttatcaggccaattgaactcttaaggttcacttaatctctgacgcgcatactctcctccaggttaacggaggagagtgcaatgaaaaaccgtgtttatgaaagtttaactaccgtgttcagcgtgctggtggtcagcagctttctttatatctggtttgccacgtactgatctttcttcagccgtacccaggcccgcgtgccggaagtctcttgccggttttgcaggaaaaactgcccgtgatgcaactgtgtaatgcggctgacaatacttaaccccagaccaatcccgccataacggctgtccatacgtacaaacgctttactcaactccccgcatttactctcatcaatacctggtccttcatcttcaactgccatgaccgctccgtcatcttcttgcagcttaatcataatgttgctgccttgcgggctgtaacgatgggcgttttctaccaggtttcgcaataacatccgcagcagggttgcatcaccctgaacggtgatgtcggcggcgctctctggcaatagcagggtttgctgtcgctggtcgagcatggtactgagttcgtcatagctggggagaatgacatcttccagcagttttacatgttgataattaccggaagaaaaactctgtccggcacgcgccagttgcagcagctgggagacgctctccatcatctgatcaagccgtgccactaacggtgctacatcaatgtgatgcgttttcgccagcagttccagatgcaaacgcacccccgccagtggcgttcgcagttcgtgcgcgacgtcagcggtaaacaacctttcgttatccagcgtgctggtcaggcgactgaccagatcgtttaacgcgctaaccaccgcttcgatttcgagggtggcgctgtgaatggcaatgggcgttaagttgtcggcggtgcgcgcttccagctctttttgcagctccgccagcgggcgggtgatgcggcgtaccgcctgatagcagataaatagcgtcaggctgaccataaagacgccggggacaatcaggctggcgaccgcctcgcggatctcacgcatgatgtggcgatcgttgttgcgattgtcgcgtagcgcctgctcaaacagctgaatctgctcggtactttcatgccatagccagaagacgctgatcagctcaaacaccaacaaaatggccccgatggtcaatatcagccgttggcgcaggcttattggtcggcgcagaaaatgcatcagattcaattagttttcctcattcgcgaccagcatatagccaaagccgcgcacggtgcggatacgggctttgcccactttgtcgcgcagattgtggatatgcacttccagggtgttggtgctgggttcattgtcccagttatagatgtcgttgtagagaatttcccgatgcaccggactgcctgctttgagcattaaccgactcagcagagcatattctttgggcgtcagaatcaactcttcaccgcccatccatacctgacggcgacccatgttcagcgtcagattgccaacaatcagctcactttcgccctgattattatggcgtcgtagcagggcgcggatacgggcatgtaactcttccagcgcaaaaggcttcaccagatagtcgtcggcaccgacatccagcccggcgattttgtcggtcagcgtatcgcgagcggtgaggatcagtaccggcagggtatattttttctgccggatacgggcgagaaaatgcagtccatcttcgtcgggtaaccctaaatccagtaccaccaggctgtaatgacctgcctcaaggctttgttccgccatccgcgcggttgtcacgctatcgcacgcgtagccttcggtttgcgccgccagaatcagtccctgcaataacagcgtatcgtcttcaacaatcagaattttcattcactcactctcctgcaagtttgcagaatatcatccgcagcctggtaatacttcgtctcaacgccagttaatcccaatagcgtggagaataaattgtcttgactatagtgttgcgtttgcgcctgtttttgcaggcagttctggtcaacctgataccgtttttgataatcctcgctcagccacagcagcatcggcacctgtttttggctatccggggcgatggcataaggcagaccgtgcagatagatgccattttcacctaagctttcaccgtggtcagaaagataaaccaggctggtggtaaatttatcctgatgttctttcagcagattaatcgctttatcaacaatatagtcgacgtaaaccagcgtgttgtcgtaagtgttcaccagttgctctttggtacaggtctggatctcattggtgtcgcaggttggggtaaatttcctgaactgaggcggatagcggttgtaataggtcggaccgtggctgccgatggtgtgtaagacaatcacgccatcaccttgcaggttattgatgtactcttcaagcccgtggaacagcacttcgtcatagcattcgccgttgatgcactgatcaggtagattcagcgcggtgacgttctggtgaggcacgcggtcgcaggcacctttacagccgccatcgttgtcattccacagcacgttgatgcccgctcgctgaatgatatccagcacgccttcctggtgctgtgccagctcttctttgtagtgctcacgcggcatatcgctgaacatgcacggtacactaactgccgttgccgtgccgcaagatgcggtattagggaaatagaccacgttatctttcgccagccgcgggttagtttcacgcgggtagccgttgagggagaagttctccgcccggctggtttcgccgacaatcaggatggtcaaatttttacgtttttcgttctgcattaacgggttgcggtgcgcgtcttcaccaattcgcaccagcggcagatttgccagtcgctgatgggagtaccaactccagctggcaacaatgctgttagaggggcttaaggatttcaccagctctttgttattgcggaacaagctggcgtagtctttataaaacagtgcggcgaccagcaaaatcagtagtacagaaaccagaatattggctccacggaaaagaacactgcgcagacggctggtggcaggtttgatttttatccagcaggcaatcagcgcagcaagcacgccgctgaatcccagcgttaataacatttgcggtgtcatcagcgcataactttctgccggagtggtatcaataatattggcaatcatgctgcggtcgatgacgatgccgtaagtcattatgaaatattgtgcagccgcgccaaccagaataaacaggcaggccagtggtcgattaagccataagaaagagcttagtgtcaggacaatattaatcacgctgaaagcgacgaccggcatgctcaagaaaaccagtacgttatgcaggctatccagcggcagcgcctgcaacacctgtttaaaaaaggcaatattcaggcagatagagatataaaaagcggccaacaatagccaggcgagtaaattcaaagagggtctttttagtaggcgcttcaacatcacggtgtttccatcgaacaaagtgcgcatatgctcgcaaagcaaaattaagccaaccttaagttcttaaggttggcttttatgtttgctggattaaggggaattaatctttgcttattggtgcatctaagggatacgggtttttatgtagccggttgtaattcagcgcatacatggcggtgatgaccatcagggtgacaaaactccacataacctctttcgctccggaccccaccacggcccagatgcagtagaggaaggcaatggtagtaactgccagatatgccgggcgtgctttaccaaagtgaccgtgtccgagcagcagtaacgccgcacaggtgtaaagatatggcaccagtgtaaagatgacgctgacggaagaaaccagaccgaactctttggtcgcgtttggactaatgctgctgagctggaagatggtcatcaaaataccgacgataatcagccccgccactggcgtacccgctttatttacacgggcaaaaatcggtgggaacagtccgtcatcggcagcggctttcgccgtttgacccgccagcaacgtccagccgcccagactacctaagcaacccgcagctgcgcagaaggaaacaatggccccggcggtgtcacccaacgccatccgtgcggcatcaccgaatgggctagcagaaacgcgcagtgcggcattagggatcatccccataatcgcggtggtagaaagtacatagcaaacggcggcaatcaataccccaccaatggtggcgatagggacattgcgtttcgggtttttcaccacacctgcggcaacggaggcactttccacaccgatgaagctccacagcgtaacgttaagggtactttgaattgcaccgaaggtgcccaggccgctgacgttccatgccgccatataggtttcaccacggaaccagaaccagccaaatacggcaatcccgacgatggggatcagcgccagcacggtggcaactgcctgcacacgggtgatcattttcggaccgacaatgttcagcaggacgaagatccacagcaccacgacgcaggtgatggttaataccaatggatctttcagaatcgggaagaagtaacttaaatatcctacgccaatgaccaccatggcgatattgccgatccagcaggccagccagtagaggacgttggtttgataaccgagaaacgggccaaagcagcggcgggcgtaagcgtaagaaccaccaggacttgggtcgaggaagctcattttggcgtataccatgctgagccccagtgcaccgataatcgtcaccaaccatccataaatggcaatcccgccagtagaggccaggtttgcaggtaacagaaaaacaccactccccataatattcccgctcaccatcagggtgacggggattaagcccactttgtgagcatcagcatcgctagacataattaaactcctgcgaaggcgagcttcgtgacaataaattacgtcatatcatacgcctgcattcgatagttgaattattatcgaccgggttatcgctgatgccgttattaatatagctcttcgttaaggttaaaaatcaggcgacagtgcgttctctgtgctgactaacataatgcagcggcgtcataccgtagaagtctttaaagacagaaataaagtagctcgtactgttgtagccgcaggactgacttacctgagagatatttttaccgtccatcattaattcatttacggcataacgcatgcggcaggtggtgattatttggctataactggtgttttcgcttttcaactttttctttaacagacttgggctaagacataaacaactggctaccatactaagattccagtctttgtgaatatcgctttcaataatttgataaacgctgtcacttacacaattacgtaacatatacatcattaaactaacgaattttttactgtcgagaaaacgggatagcaccgtgaataataatgcgcgtgttcgttccttttcactctcagtttctgcgggcatcatgctgtgttgcgcggcaacgcgaaagacgtctggcgtcaggcatggcagggtgagtatgggcgtagcgctacgttgccatactggtatttggctgagatctttattcagaaaccggaggtaatctttgatgatgtcgtgactaatatgagcaaccaaagtgttgttaagagaggagacgtcgataatattattttcacaatttaataacgccatatggttagctttaaggctaataggttctttcccattcacccttatccagacatctttttcagtcaataaaacaatacaaggttggtcgctgcaaatcctcatacatgtactcctgagtgcgaataaaagaccagttctcgctaaagcaaagcgataccgggaaatggttatataattgtatgatgaatataaacatgcataaaaataacgagttttactaatagtacaaatttttatagtaatttctcatgtacatatttttttacaggataaataacaggcaaaaaaaagcgcggggtggggccgcgcaaaaagtatgacatttttgtttgcagcaatttttatgaaaacgttgccatactcaaaaggcctaaggccaggcggcgtaatgttatttaaacaattacgccttcagcggaatagtggttacgctttcacgcacataacgtggtaaataccgtcaataatttcagtcccttcagtttcgtgttcaaatccagggaaatggtggtcccaggattgcaggctgcgtaaataacttacttgcggactgtttttatcgccgaagttttcaccagacagcagcatcgggattcctggcggatacgggataacactgtttgccgcgatgcgtcctggcagattttcaatggataccagttcgacattgttgtcgacaatcgcgttgtacgcttcacgcggggtgacttccgccaccggcaggccggaataggcttcgttcaaccgtgcgccagggttgttttctttcagccaggcaaacatggtgtcacccagatcgtgaatccccatgttcgcgtaagtgtcaggatattgttcaacaagttccggcatcacctgcgccagcggtgtgttggcgtcatagtggcgtttgaaggagcaaagggtgttaaccagagttccccatttcccacgggttacgcccatagagaacaggaacataatttggaagtcagtggtgcgggtaggtacaatgccgtggcgaccaagccaggcagtgaccagcgccgccggaacaccggtttcttccagttcaccatcttcacccattcccggagcaaggatgctgactttaatcgggtcgagcatactccagttatccggaatatctttgaagccgtgccagctttcgcccggatgcattacccagcagtcctgaacggtggtcagcagtttggttggtgcgtcagcaaagtcataggttttgccggtttgtgggtcggtgacgacttctttgttccacggtttgaagaaccagctaccgtcagcggtgaactctttatatagccgcgccatcgcctgacggaaatcaaccgcttcgtcaatcacttcctgtgtcagactcaggccgctgttgccgtccatcatgctcaccgccacgtcgttggatgcgcagatggcatacagcggggaggtggtggcatgcatcatgtaggcctggttgaagcgggagaagttaatcgccccacgaccttcacgtacatgaatataagaagcctgactcagcgcattcagcagtttgtgggtggagtgggtggcgaaaacggtaggaccgttgtgatcgccaggttcgccgcgcatggcatagtgatcggcatagatcgggttgaaacgtgcatagccgtaccaggcttcgtcaaagtgcagacgatcggaggttttttccagcagatcctgcgcttctttagcgttataacacacgccgtcataggtgcagttggtcaccacgcagtaagacggtttttgcccggctttgtctttggtcagcgggctttcactgattttcttctgcaaggtttcaggttgcatttcctgcggatagattggcccgataatgccgtagcggttgcggcttggcaccatatagaccggtttcgcgcctgtcagcatcaaaccttgttcgatggatttatggcagttacggtcaacgaccacgacatcgttatcggtcatgcaagcctgcatgatggtgcggttagagccggaagtaccgacgactacgctccaggagcgatcggcaccaaatacgcgtgcggcatatttttcgctttcgccaaatgcgccagtatggtcaagcaaagaaccgagggaagttcgttcgatgcccatgtcggtgcggaacagattttcaccatagtagtcatggtagaaacgtccggcgggtgttttggtaaaaccaacgccgccctggtggcctggcgctgcccaggaatattcatggatgtcactatatttcatcagcgcgctgaacagtggcggcaacagctgctggcggtagcgggtcatcgcggcaacggcgcgtccggcgataaagtcggcggtatcttccagaatccaggcgaattcatcgacaagctccagcaggtcgcgatccattgcggcgagggctttttcccgatcgcccaacaggaagaccggcacgttttgttggcgctcatgaagcttaccgatcaattgtctgacgttttgatgttcgtccggatgttccatttgatagctgaacatcaggcagtcaatggcttcgttactagagagaatggcaaaaccatcatcaaaggaggtggatttaatcacggtaacattttgctggcttaaagcatctgccagacgctcaacggcgttaccgacccaggtgtcttgatggagaaactcgctttcaacaattaatactttcatcattgcttacccggttatgaaggaatcttcgttgcgggcaagtatcttccggccttttcgggctgtaaagcgcgtgaaaaacaaacatttttgaaatatttagttttataaacaatacgttatgtgattattttaaattattttcactgcttattatcgacggctaaactatttttttggctgatactgatatcgtctttagccgggaaacgtctggcggcgctgttggctaagtttgcggtattgttgcgggctcatgccgacatatttgccgaacgtgctgtaaaaacgactactactacgaaagcctgccgtcagggcaatatcgagaatacttttatcggtatcgctcagtaacgcgcgaacgtggttgatgcgcatcgcggtaatgtactgtttcatcgtcaattgcatgacccgctggaatatccccattgcatagttggcgttaagtttgacgtgctcagccacatcgttgatggtcagcgcctgatcatagttttcggcaataaagcccagcatctggctaacataaaattgcgcatggcggctgacgctgtttttgtgtgtgcggctggttttattgaccagaatcggttcccagccagagaggctaaatcgcttgagcatcaggccaatttcatcaatggcgagctggcgaatttgctcgttcggactgtttaattcctgctgccagcggcgcacttcaaacgggctaagttgctgtgtggccagacttttgatcaccatgccgtgagtgacgtggttaatcaggtctttatccagcggccaggagagaaacagatgcatcggcagattaaaaatcgccatgctctgacaggttccggtatctgttagttggtgcggtgtacaggcccagaacagcgtgatatgaccctgattgatattcactttttcattgttgatcaggtattccacatcgccatcgaaaggcacattcacttcgacctgaccatgccagtggctggtgggcatgatatgcggtgcgcgaaactcaatctccatccgctggtattcgctatacaggctcagcgggctgcgggtctgtttttcgtcgctgctgcacataaacgtatctgtattcatggatggctctctttcctggaatatcagaattatggcaggagtgagggaggatgactgcgagtgggagcacggttttcaccctcttcccagaggggcgaggggactctccgagtatcatgaggccgaaaactctgcttttcaggtaatttattcccataaactcagatttactgctgcttcacgcaggatctgagtttatgggaatgctcaacctggaagccggaggttttctgcagattcgcctgccatgatgaagttattcaagcaagccaggagatctgcatgatgtctgcacccaaaattacatttatcggcgctggtagcacgattttcgttaaaaatattcttggtgatgtgttccatcgcgaggcgctgaaaacggcgcatattgccctgatggacattgaccccacccgcctggaagagagccatattgtggtgcgtaagctgatggatagtgcaggggccagcggcaaaatcacctgccacacccaacagaaagaagccttagaggatgccgattttgtcgtggtggcatttcagattggcggttatgaaccttgcacggtgactgatttcgaggtctgtaagcggcatggtctggaacaaaccattgccgatacgttggggccgggcggtattatgcgcgcgctacgtaccattccgcatctgtggcaaatttgcgaggacatgacggaagtctgccccgatgccaccatgctcaactatgttaacccaatggcgatgaatacctgggcgatgtatgcccgctatccgcatatcaaacaggtcgggctgtgccatagcgtgcagggaacggcggaagagttggcgcgtgacctcaatatcgacccagctacgctgcgttaccgttgcgcaggtatcaaccatatggcgttttacctggagctggagcgcaaaaccgccgacggcagttatgtgaatctctacccggaactgctggcggcttatgaagcagggcaggcaccgaagccgaatattcatggcaatactcgctgccagaatattgtgcgctacgaaatgttcaaaaagctgggctatttcgtcacggaaagcagtgaacattttgctgagtacacaccgtggtttattaagccaggtcgtgaggatttgattgagcgttataaagtaccgctggatgagtacccgaaacgctgcgtcgagcagctggcgaactggcataaagagctggaggagtataaaaaagcctcccggattgatattaaaccgagtcgggaatatgccagcacaatcatgaacgctatctggactggcgagccgagtgtgatttacggcaacgtccgtaacgatggtttgattgataacctgccacaaggatgttgcgtggaagtagcctgtctggttgatgctaatggcattcagccgaccaaagtcggtacgctacctagccatctggccgccctgatgcaaaccaacatcaacgtacagacgctgctgaccgaagctattcttacggaaaatcgcgaccgtgtttaccacgccgcgatgatggacccgcatactgccgccgtgctgggcattgacgaaatatatgctcttgttgacgacctgattgccgcccacggcgactggctgccaggctggttgcaccgttaaaacgcgactaaacgctactgcgccgggggatttattccggcgcacacctctgacgataccaataacagaaggcgggcgttggtaacagcgacccgataccctatgagcatttcaatgactacaaaactcagttatggatttggagcgttcgggaaggattttgcgatcggcattgtgtatatgtacctcatgtattactacaccgatgtcgtcgggctgtctgtgggtttggtcggtactttgtttctggtggcgaggatctgggatgctattaacgatccgattatgggatggattgtaaatgctacgcgaagccgatggggtaagttcaaaccctggatcctgatcggtacgttggcaaactctgtaatcttatttctcctctttagtgcgcatctgtttgaaggtactactcagattgtctttgtttgcgtgacctacatcctctggggcatgacttacaccattatggatattcccttctggagcctggttccaaccatcacgctcgataaacgtgagcgcgaacaactggttccttatccgcgtttttttgccagtctggcaggctttgttacggcaggtgtgacgctaccatttgttaattatgtcggcggtggcgatcggggatttggctttcagatgttcactctggtactgatcgccttttttattgttagtaccatcatcactctgcgcaatgtgcatgaagtctttagcagtgacaatcaaccgtctgctgaaggaagccatctgacacttaaagccatcgttgcgctaatttataaaaacgatcagcttagttgcctcttgggtatggctcttgcttataatgtagccagcaacattattaccggctttgctatctattatttcagttatgttatcggtgatgcggatttgttcccctattatctgagctatgcgggagctgctaacctggtgacgttagtattcttcccacgcttagttaaaagtttatcccgacgcattttatgggccggagcatctattcttccggtgttaagctgtggtgttctcctgttaatggcattaatgagctatcacaacgtcgtcctcattgtgattgcgggtattttgctgaatgtgggaacggcgcttttctgggtattacaggtcatcatggtggcagatatcgttgattacggtgaatataaactgcacgtacgctgtgaaagtatcgcttactccgtgcagactatggtggtgaagggcggtagtgcctttgcggcttttttcattgcggttgtgttagggatgattggctatgtaccgaatgttgaacagtctacgcaagccctattaggtatgcagtttattatgattgctctaccaactctgtttttcatggtaacgctgattctctacttccgtttctatcgcctcaatggtgacacgctgcgcaggatccagatccatctgctggataaatatcgcaaagtaccgcccgagcctgttcatgctgatattccggtcggtgcagtgagtgatgtgaaagcctgacgtggacaatagctaacgaaaatggcctgatgcgatatgtttatcaggccacgtcttaatgtaatgctttggatttgcaaattttgtagaccggataaggaattcacgccgcatccggcatcaacaaagcgcaagttgttatccggttatcaagccaaagcgccgtagctggcggcaatgaaagcgagcgaggaatatcaccgtcgttaatgcgccaagcagcgcgcagaacatatcggattgcgtgtcccactggtcgccctgggtgccgagaaaatcatccgctccctgacccattgccagcgctgcccaccactcgattaattcatacatcgcgcttatcgccagcgccacgcagcagaccaggaacgccaccattttacgtccgcgcacgtacatcccgcgaacgagaatttctcgtgccaccagtgcaggcaccagcccctggaaaaagtgccccagcttgtcatacggattacgactcaaccccagccattcctgcacctcaaaaccaacggggactttcgcgtaggtgtattgtccgccgaccatcaggatgatggcgtgaaggaaaatgagcgtatagagcagcggcgttaacggataacgtctggcggtggcaagcagtagctgcacgacaataatcaccggtgtcacttccatcagccaggtgagtttgtcatgggcgctaatgccggtataaatcaggattaacgttagcgtcagtgcgctggtgttaagaattaacggcttgagtgtgcgggtcatggtgagttcgcaaatcagggaaaatactgactattcaccagcaagcgtgaaattacaatcgcaaaagaggtggccagggggatcacctggcagcatgctgccaggcgctgggccgaagaggttacttagtgcagttcgcgcactgtttgttgacgatttgctggaagaagtcgttacctttgtcatcgaccaggataaacgccgggaaatcttctacttcgattttccagatagcttccatacccagctccggataagcgacgcactccagatgcttgatgctctgctgcgccagtaccgccgccggaccgccgatgctaccgaggtagaagccgccgtgtttatgacacgcgtcggtaacctgctgactgcggttacctttcgccagcatgatcatgctgccgccgtgggattgcagcagatccacgtaggagtccatacggcctgcggtggttgggccaagactaccacttggataaccggcaggggttttcgccggacccgcgtagtagatcgggtgatctttgatgtactgcggaagttctttaccggcgtcaatcagctctttcagcttggcgtgtgcaatatctcggcccacgataatggtgccggtgaggctcaaacgagtggataccgggtattggctaagctgggcgaggatctctttcatcgggcggttaaggtcaactttcaccgcttcgccttcaccggcctggcgcagttcttgtggaatgtactggcctgggttgtgttccagtttttcgatccagataccttcgcggttgattttcgctttaatgttacggtcagcggagcaggagacgcccatgccgaccgggcaggatgcgccgtgacgtggcagacggataacgcgaatgtcgtgcgcgaagtatttaccgccaaactgcgcgccaagaccgagtttctgggcctcttccagcagttcctgttccagctggacatcgcggaacgcctgaccatgttcgttcccttccgtcggcagttcatcgtaatagtgagcgcttgctaacttgacggttttcaggttggtttccgcagacgtaccgccaatcacaaacgcgatatggtacggcgggcaggctgcagtaccgagggtacgcattttctcgacgaggaagtttttcagtttgccgggagtcagcagggctttggtttcctggtagagatacgttttgttggcagagccgccgcctttcgcaacgcaaaggaatttgtactcatcgccatctaccgcgtacaggtcgatttgcgcaggcaggttagtgccggtgttgacctctttgtacatgtccagcgccgcattctgactatagcgcaggttatcttcgatataggtgttatagacgcctttgctcagcgtttcttcatcaccgccgccggtccacacgcgctggccttttttaccgacgatgatcgcggtgccggtatcctggcaggtcggcagcacgcctttggcggcgatttcggagtttcttaagaattgcagcgccacgtacttgtcgttttcgctggcttctggatcgtgaagaatagccgcaacctgtttctggtgtgccgggcggagcataaaagaagcgtcgtgaaaggcttgctgcgccagcagggtcagggcttctggttccactttcaggatggtttcgccgtcgaagtcggcaacgctaacgtaatcggaagtgagtagatagtattcggtattgtctttccccatcgggaaaggtgcctggtagataaagggtttgttactcatagcttccagcctgtaactctgtatttgttattcgaaaatggcgtgccgcgtagtcacgggcggcacgcaaagtgcatttataagaacccgtacatcgcggcgaagatccagccgaagacgcagcttacgctcacaccaatcaaccccggcagaataaagctgtggttgatgacgaagcgaccgatgtgggtggtgccggaacggtcaaactgaatcgctgccagatcgctcggataagtcggcaggatgtaataaccgtagcaagccggtgcactagccacgatgtatgccggatcaacgccgatcgccagcgcgaccggaacaatcgccgccagcgccgcagcctgagagtttacaaacttggaaaccagcagcagaacaatggcataggcccacggatactctttcaccatttcacccagtacgccctgaatttcagacatatgcgcaccgaacatggtttctgccatccatgcgataccgtacaccgccacgatggcgatcataccggaacggaagacttcgtttttactgatagacgcgggattggttttggtcaggataataatcagcgccccggtcagcagcataaacatctgaataaccagtaccatgctcagcggtttgccgccgaaggatggacgcaggtcgctatcagcaccaagaagggcgactacagcgattgccccgaggaaaatccacattgccagccagttgcttttcggcagttttttatccagcagcgtcgcggtatcaccgtaaacatactcacggttttccggtacggagatgaatttctggaactcttcgtctttatccagatctttaccgcggaaccagctgaagataccgatcgccaggataccgattaacgtgcttggaatggtgattgccagcagatcgaggaactcaagatggcgaccatcaaaggtgacattacccagcatcgcaaccagagacacgaccgcaacgctcaccggactggcgataatccccatctgtgcaccgatagaacttgccgccatcggacgttccggacggatgttgttcttaatggcgacgtcgtagatgatcggcagaatggtgtaaaccacatgacccgtaccgcaaagaatggtcagtgtacaggtcacaaacggcgcgacaatactgacatatttcgggttgcggcgcagcagcttctcggcaatttgcagcatgacatcaagaccgccgctagcttgcaaggtcgcgcttgccgccaccaccgcaatgataaccagcatgacatcaactggtggtttacctggctgaaggtggaagacgaagaccagaatgaccagaccgataccgcctaataaacccagcgcgataccaccctttctggcaccataaaacagacatatcagtattatgataagttggatagtaaataacatgtgtgaaccctcgcgataatcctatttaaatttttgctgaatagatcacagtcacgttctgttttgtatgaactgttttcagagcctgactaaatatccgtttggtcgttaccggctttagcaaatacctcacagtgaatattggctgattaaagcagcggcaaatttatgcactgtgataagcggctttttcagagagaaagactctctggcgatgggtttatagtttgtactgcgcagatgttaatgttttgtttgctgttatcttattgatatttatcggtctattttttgttctcagggcagatgtcattaggtttatagattaatctgatctacccatttgtgggtaaaaatacacataatgcgggtgacataatagttaattaacttttgttagcgttttgaaattaaaaacaccgttcacctgaagagatattaatttttagcgatgatggagggataattatatttgatctggcacaagttttactgatgaaggatgtaacttgtgccaggggtattttgcattacggtaataattattacttacagataaccagcgatccgttattggcaatattgtttcagtagactgtagtgttctgcctgaatacggtaacggtaaactggacgccccgtgacgccataatggatactggtgaacaagatgtggcagttgaccagccagatgaggtatttacggcaggaaacacggctaatgttaacctcgttggctagctcgtcggtactaaattcatagtcctggtgcgcgtcaatccactggcacagtgtgcgtaacgtctgcggcgttaagccttttggcaagcgacgaggatcctgttcgttggagctgctgccgtggattagctgatcaagctcggcctggtcataatactgatgtttttccagcgccattttcttttgccgccagccggtgagcgcctcttcaaagcgggaagcctggaagggtttgatcaggtaatccacgacaccgtaatgcaggctatctttaatggttgccgcatcggctgcggaggagatgacaatcacatcacttttgcaacgcgcgttatgcaggacaggcagtaaatcgagcccgttctctttttgcatatagatatcgagcaatatcaggtcgataggcgtatcgctattgaagataatctctttggctttctccagcgtgctggctgttccacagcattgaaagcctgggatttgtgctacgtatcggcgattcagctccgcgaccattgcgtcgtcatcgataattaatacattgatcatctgttgctcctctccccgtcccagggtatctggacaaaaaattgtgtgaaaatcccgggttcgctttccacggcgatgctgccgccgagattttctacctgttgtttgacaagtgctaaaccgacgcctcgctcgcttccttttgtgctgacacctttgtcaaaaatgtgatcgattttatcgggtgcgatccccggtccatcatcattaacttcacagtgcagccagccgtgacggtagtgcaatgttacgctaatttcgcctccgggttccggccctaatgcctccagcgcgttttctatcagatttcccaacgtggtaatcagcgtcgcgacctggtcctcactgccgctgtctggcagctggctttcactgtttaaaatcagcgtatggcctaaatcggtcgcgcggttaatcttgctgattaaaaaaccagcgataaccggagatttgatcttacccagcagagagccaatctcttcctgatagttattggctgttttgagaatgtaatcttccaactgcttataactcttcagatgcaataatccgagaatcacatgcaatttattcataaattcgtgggatcgttcacgaagtgcgtcagcatagttgaccagaccgtcgagtcgctgcatcagtttacgtacttcagttttgtccctgaaggtactaatggcaccgatgataacgccattactgcgcaccggaacggtgttgatcagtaatagccggtctttaatcgtaatctcttcgtcgcggcgcggggtaccgtcgcgtaacacttcgctgacatctaccacctgactccaactgtggcttagcgtgctcagtttctcatcgtcctggctcttacggtaattcagcaattcttgtgcggcatcgttgatcagcgtgacctcgccgcgatcgtccacggcaacgacgccttctttgatagactgcaacatggcctggcgttgctcaaacagcgtggagatttcgtagggttccaggccgaaaaggatttttttcagtaccttaaccagaatgcaggtgccaatcagtccgaccagcatgccaaataatacgctccagataatgctccagcgactgtcattgatctgttgggtcacacggcttaactcaaggccgatcgccaccacgccaatttgtttatgattttcatcgtagatgggggtaaatacgcgtaaagcctgcgccagaaaaccgcgattgatagcgacattttcttcgccattcagcgctttaaggatgtcatcacctttaaatggctgaccaatacgctgggcttcaggatggctgtagcgaagactttgcatatcggtaacgacaataaacagcagatcgttgcgtttgcgtacggcttccgcgatggcctggatgccactctcctgcggttttttctgcaagccctgacggatttccgggctgtcggcgagggtacgcgccactgccagtgccttgttggctagcccatctcgcgtcatatcactgatttggctgaagtaaatcagatgcaccaccaatagcacgctgaacagtaccgcactgaccattaagatcactgtggtactcaatttcatcggacgtttgcgtaacatgcggtagggcaaactatgtctcatcagcttccttgtgtgacaaatttcttaagcattatctctgatgaggcgggtaattcaaagggagtaagaatgattggctatataggggaagagactctggcaacggaaactgccagtgctgtatgaagattccggggctatgcttatagcgataatcatactgatgagagagggaaggtcatggatcaggcgctactggacgggggttatcgctgttataccggcgaaaagatcgatgtctatttcaacactgcgatatgtcagcattctggcaattgcgtacgtggcaacggcaagttatttaatctcaaacgaaagccgtggatcatgccggatgaagtcgacgtcgccactgtggttaaagtgattgatacgtgcccgagcggcgcgctgaaataccgtcataaataagcgagggtaaaatggaaatacgcgaaggccacaataaattttacattaatgacaaacaaggcaagcaaatcgctgaaattgtctttgtgccgaccggagagaatttagcgattatcgaacataccgatgtcgatgaaagcctgaaagggcaagggattggtaaacagctggttgcgaaagtcgtggaaaaaatgcgtcgggaaaaacgaaaaattatcccattatgcccatttgcgaaacatgaatttgataaaacgcgggagtatgatgatattcgcagttgatgggagagtacagagtcacgatatttttcattctctccgcgatgtgatgcaggagagcatctgaagggtagggggatgcacaaagaatgggcagagagcgcgtttttttgtcccaagtcatcccctttactgagcaaaaaaaagaatatctcctatatgagaatcatcaatcggggttaataagttttgcgtccccagagcgtttaatattgataggagtcatattatggaaggtaaaaacaagttcaatacttatgttgtttcttttgattatccaagttcttattccagtgtgttcttaagattaagaagtttgatgtatgatatgaatttctcctctatcgtggctgatgaatatgggataccacgacaattgaatgaaaactccttcgcaataacgacaagcttagccgcaagtgaaatcgaagatttaatcaggctcaaatgcttagacttaccggatattgattttgacctcaacattatgacagttgatgactatttccgtcagttttacaagtaaccaggaaggataagaagaacataaaaaatggcactattctctaaaatattaattttttatgtgattggtgtgaacatatcctttgtcattatctggtttatcagtcatgagaaaacacatattcgtttacttagtgcattcctggtcggaataacctggccaatgagtctgcctgtggcattacttttttctctcttttaagagctgtagttgagtggacccgctggttatcgtgaaacgaagcgtctctcctcaaaactggatttgcggaacgatgaacgaagcagtcgcctgactgcttcgttcattaaagtgaaatttatttctgtgggcgcatcgccgggaagagaataacgtcgcgaatagtatggctgttagtaaacagcataatcattcggtcgataccaatacccagaccagcggttggcggcagaccatattccagcgcagtcacgtaatcttcgtcatagaacatggcttcgtcgtcacctgcagctttagcattaacctgttcctggaaacgttcagcctgatcttctgcgtcgtttaattcgctaaaaccattaccgatttcacgaccaccgatgaagaattcaaaacggtcggtgatttccgggttaacatcattacggcgtgccagcggggacacttctgccggatattccgtaataaaggttggctgaatcagatgtgcttctgccacttcatcaaagatctctgtgacaatacgtcccaacccccagcttttctctaccgtaataccgatagattcagctaatgctttagcagcatcaaaattatccaggtcggccatatcggtttctggacgatattttttgattgcttcgcgcatggtgagtttttcaaacggtttgccgaaatcaaacacatgctcgccataagtgactttagtggtacccagaacctcttgtgccagggtgcggaacagactctctgtcagttcaatcaaatcgtggtaatccgcatacgccatgtagagttccatcattgtgaactcaggattatggcgaacagaaataccttcattacggaagttacggttgatttcgaatacccgttcaaaaccgcctacaaccagacgtttcagatacagctccggcgcgatacgcagatacatatctaaatccagagcattatgatgggtaataaacgggcgagcagatgccccacctggaattacctgcatcatcggggtttctacttccataaagccgcgcgcgaccatgaattgacggatagcggccagaattttactacggacaacaaacgtttgacgggatttatcgttagcgatgaggtccagataacgttgacgataacggacttcctgatcctgcagaccatggaatttatctggtaaaggacgtagtgctttagtcagcaggcgcagctcagtacagtgaatggaaagctcacccgtttgcgtcttaaacagcgtaccgcgggcaccgataatgtcacccagatcccattttttaaactgatcgttataaacaccttctggcaggctatctcttgcaacgtacagttgaatacggccaccgacatcctgcaacgttacaaaggaggctttccccatgatacgacgggtcatcattcggccagcaacgctgacttcaatgtttaaggattccagttcctggttatccttcgcatcaaactcttcgtgcaactggtcagaggtatggtcgcggcgaaaatcattgggaaacgccacaccttgctgacgtagtgccgccagtttttcgcggcgatttctcagttcatcgttaaaatcaatagcctcattggctccccgtgtttcttgttcagacattttggttcctctaaatccagctttcaatttagcgtagataaagagacagatcggtacactgtattatctgcctcgactattagtaactcagtttatcttatcgaaactaacgcttacctcaagttgatatcactaataaataaccatcaaaatggtttaaatgacttattaatctcgatttgttagtgttataaactaaaagttaatttattcataaccaattgtttttacgacagttaatcgttgctctcctgtatcatattcgtcggcgtgctaaacagaaaacgggtagcaaaggccaatacgacgatgatcgcgacacaagccaacgtccactctcccatctgagaaaagaatcgctggtaagctgcaattgccataccgctaatttggctctctgtcgtctgctgtgccacgacgcctgccagccagttggcgaccgcgcctgttgccagcatataaatcccggttaatacgccagacattttcagacgcgtgatttgcgcaatcgccaccgggtcaataaagagttcggcaaagcccattagcgccagcccggatatcatcacgcccatactcgcttgaccgtcagccgctgcatgtcgggcatcaaatgccaacaacataaagccacaagccatcagcagtaagccaaaggcaaacttcagccagacgcgcaatgtactgttgccgcggctttctgggctcgccagccaggccagtacaaccccagcgagcatcaccgcaattgcattcacgctctggaatagtgctgtaggtacttcaatattgaatgcctgacgattcacaaagcgatcgataaacaagctgatggtactgccgccctgttgtgccagtacccagaacaatgtcccgacaaacatcaacaatacaatttgccaaagagcacggcgatgttcggggaatttgatcatcatgcgggcaatgatttgtgcggcaatgaggcaaacgatcgccagcaaatatccggaccagtcgttctccagcagcagagtaaaaaatactggggctaaacagagcatcaccactaaccagctccatactggtaaggcaaatttgacactagtgagcgcttttttatccatactacgtgtggactggaaatgacgatgaccgcttaagaaaatcaacaaaccgataaacatgccgccacccgcaagggcaaagccaacatgccatccataccactgagcagccaggccgcaggcgattggggctgcgatagaaccgatattgcccgcagcatacagcaggctaaaaccgccatcacgtcgatgatcgttctcgtcgtagagctcgccaagcaaacagctgatgttacttttgaataaaccgtagccacaaataatgattgccagcgccagatacaggctaaaggtactatttgtatcaatacccagcaccacatggccaagggtcattaacagcgcgccggcaatcactgcagtgcggttgccgagcaggcggtcggcaagccagccgccgagaataggggtaacgtaaaccagagaagcatatgcgctgaacaggctgatggcatggttatcatcaaaaccaagctgatgggtgagatagagaatgagtaaggcacgcatgccgtaaaaactgaagtactcccagatttggatcgccacgatatagtatatcgcgcgcggctgactgggtgttttcatgtgttctccttatgagcaaaaaagggaagtggcaagccacttcccttgtacgagctaattattttttgctttcttctttcaataccttaacggtatagcggccatcagcctgacggtatgcaccgtgaatatcggtttcaaagcccggatagtgagcgccgatttcacacagcatctgcaggaactccagaaccggacgactttcttcggtgatcatttcacccggcattaccagaggaactcccggcgggtacggaaggatcatattggcgttaatacgacctaccatttcgtcgaggtaaacttcttcggtcataccgtgcagctctttctggaatgcagcatacggagtcattaccatcgtcggcagcacttcaaatgcgcgatacatcagatccggcagattgtggtgaacaatcagtttgtggatattctgagccagttcctgaatacgcatgttttcatagaattcaggatcttcacgatacagagacggcagcatgtttttcacacgcaggttcaggtcgaacgcacgtttaaagtcagtcagagcacgcagcaggctcagtgctttggtcttatcgataccgatgctgaacaggaacagcaggttatacggaccggttttctcaacaacgatgccatgttcgtcgaggtatttcgccacgatgctggccggaataccaaagtcgctcatggtgccgtctttttccatccccggagtcagcagggtgactttgatcgggtcaagatacatgtgctcgttatcgatgtttttgaagccgtgccaggtgctgtcagaacgcagcggccagcattcagtcgtatcgatatgatccggctgccatacatcaaagaaccagccatcagattccgttctcagacgtttgatctctttacggaatttgatcgcacgttcaatagaaccgttgatcagacgcttacctgcattgcctttcatcatcgccgcagcggtttcagtggacgccacgataccgtagtgcggagaagtggtggtgtgcatcatgtaggcttcgttaaaggtttcttcgtttacgtcacctttaacgtggatcatggaagcctgagagaacgccgccagcagtttgtgagtggactgggtttcgtaaatcactttcccttctacacggccaccgctcataccgcatttaccttcgtaaatcggactgaagttggtgtaaggcacccacgcggagtcaaagtggatggatttcacatccagtgttttcttgatgaagtcggtgttgtacagcagaccatcataggtagagttggtaattacagcatgtaccggccaggttgcgtttggtgtttctttcacgcgcttagcaatggtagcgtgctggaattcactctgtgggataccaccaagaataccgtaagcgttacgggtcgggcggaaatagattggcgtaacatcgctcatcatcatcaggtgggtcaggcttttgtggcagttacggtcaatcagaatggtgctgcctgctggagcagagtacataccaacaattttgttcgcagtggaagtaccgttggtcaccatgtagctgcggtctgcgttaaagacgcgagcgatatactgttctgcttctttgtgtggaccactgtgatccagcagagaacccagttcagatacactaatggaaatatcagatttcatggtattcggaccaaagaaatcatagaacaggctacctaccgggcttttctggaatgcagtaccgcccatgtgaccaggagtacagaaagtatatttaccttcacgaacatatttaaacagtgctttagtcagcggaggcagaatagtgttgatatattcgtcagtggtctgcttgatcttattagcaatatcttcagcagcacccagcgcatattcaaagaagctaatctgtaaacgcaggtcattcaggcttacatcgagagtggaatacgtattagcgaacgcgtacaacggcaggttctcgttcattttgctaatttcttcgcacagctcgagattatatttatcccagtcaaaaataacgccgcacagacgcgcattgttttcgatcagttttaataagtcgtcacggtcgttcgggtaaacaatctggaagttcagacgttcaagcgcgcgatgaagttcacggatgggttcttctttaaaataaacccccatgtgattcaatattgcaataacgttcatagtcatatctccaggtaaaaaaggcccctcccaacacatgggacaaaatgaaaggaggagcctcggaaaatacttttaattaatgtgcgttagacgcggtgtggttatccatactgtggctctggcgctcgtgcattttgcgagcgtagaacatcaggataatcaggctgacgatgaaggtacctgccagctcgaaggagcttgcgcccatcagcgcgatgaagcagaacacgcaacccagtacagagcagatcaggctgacaaagttgcggatgttaacgccttcaaaacgaatcaggtcaacgcaagagtagaaatacggcagcatagtcagcagtactgcgataccggtcagttcaccgaacaggtcagatgctttaccaccggcagagttcatcagagtgataaggatcatcagggcagtcattttcactgcagccagcagcagaccttttttcggaataccgttgctgtcgacttcaccataaactttcgggaagttaccgtcgttagcggcacgtacacctgcctggcctaccaacatcatccaggagcccagagaagtcaggcacgcaaaggcggtgaatgcagaaaccagcggcgcagcccagttaccgaggatagtactagcactgattgcaaacggagcaccggaagccgccattacagaagacggatacataccggaaagcacctgagtcgcagcgatgtaaacaatacctgctaaaccagtacccagcatggttgccagcggaacggtacgtttcgggtttttaaccataccagtacttacagctgcggattcaacacccacgaaggcccacaggcagagcagaatacttttaatgatcgcatgaccatcagtggtatccgcagtattccagttagctgcataagttgccgcatcaaaccaatgccagccaacaatagcagtcatcaccacaggaataagaaccagcaccagaccaatagtggttaaacggcttacccaagtaccgccgagcatatttacaaaggtaaatacccagacgatagcaatacaggcgatacccgccggaacaggatcatttaatactgggaagaaggtggaaagataagatacagcggtaataccaatcgccaggttaccaatccagttagcatggtaataaagaacacctgtctgaaaaccaaatgcaggggaaatttctccggcataagcaattgggccaccttgttgcgggttttttgttgccagtcgggcatatacatacgccaggctcattgcaccaataatagagataatccaaccccagatagcaataccaccgatacttgctaggttcgcaggtaataatgcaataccgctccccatcatattaccggcaacaacaccggtacaggcaaatagcccgatcttcttggcagaactcatgctcttctcctaatttcatttttgaatttggagtccgggtcatgatgtataactatttcctgaccagaccaaactggcgataagattactcacgaaaaaaggattaatcctaaagattaggtgaaataacacaaaagtttctgtaagtgagaacttgaggttttttattaacacatcaggatcgcaagttgatatcatgaaaagataaacatttaatgtttacaatggattgcgtgacattctctggttaaatttatgtaataaaaattatgcggcaaataaattgccgcaacatattataccaacaggaacatacaaaaactcaacaacaaatatttccgagcataaatcaacccggagttacttattcactagcaagaaatttgtcgagataaggtacaacataaggaacagaagtctggaatataccattttcaatccagtaaagggtgtttgcccctgggcgtaaattaaaggcggtgagatatgcatcagctgcttcccggttcatccccttcatttcataaaccttgccaagcaacacataatttagccaggacatttcaagatcaatgccagtatttatcgcctggtaagactcatctgttttaccttttaccagagcactgaccgcttttatttgatatataatggacaggttgttcaattccggcagtgtaacaatgttatctatttctgtgttcagtgctgctaattgtttttcatctaaaggatgttgagaatggcgcacgatatcaactaatgctttttctgctctcgcgtaggtaaattctggggaactttgaacaatctcacctaataattcactggcacggttcaaacttttatcatcgccatgcagtaaataatcatgtgcctgataaaaattagttaataacgcaccacgatgcggcaaaattttctggagcgtctcctgcattcgttgtggccacggttggtttaacgctttacttaaactctccagtaaatcattttgaatcgccagctgattaccgttagtgatgacataacgtttatccagcatggtactaccatctgcattgtctaccaattttatgctcataaagcattgttgagcacggtattggcgctgattaacaaacgcaatagataatgttttaccggaactgctcggttcatcaatgttgtagttgattttgtcatgcaccataaaggtggagaaggtgttaagacttgtcgccaccaaatcacccacgcctatcgcgtaagagagctgatacggggaactccagctgttacaacttttatttaccatattaatgtcaatatcgcgtggattgagcaaaatacggcttttgctcataggaagacgtgtatcaagactactaaacgctaccagtgctacacagatacctaagctcaacaggaaaaaaaaccatacccaaaaggtagtgaatcgtttgcttttaactggggattgttcaggtggcgttgcggtgttttgaatgttaagactgtgggagggagaatctgtggcaggaaccgcctctggtatagggggagggctagatagcattatttcctctccctcttcttcgctgtaccagataaccggcaccattaatttatagccgcgctttggtacagtagcgatatagacaggactatcttcatcattatcttttaaactcttacgtagttcactgatactctgcgtcacaacgtgattggtgacaatacttctcttccagacattatcgataagttcatccctgctaagtacttcgccactgtgttgagcaaagaaaaccagaagatcgattaatctcggctcaagggtaagttgacgcccattgcggctaatttggtttatggacggagtaacaagccattcgccaacgcgaactacaggttgttgcataatagaaactcattcgaaaagggaatgatgcaatgataattgccacaacctatttttaccatctatagatgggtttatttacatattattggtgaatgcaagacgttatttttaccagccataaacttcttgattacatagtattacgaaaggattttactgagaaccagaagtaatattccttaccatcaaaattcatcatctttgccaaagaaaaatgttcagaaaataatccatggaaaattgtccggagcacttactattttaatggattgttagtctttgcatgagcaagcgaactgatacatttctctttgttctcattcagaaaatctcatcagtcgccgttcagaccggtgttgtgctttatggatgcgttacgctcctgatgacgtcatttgacgttcaacagcatcacggggccgcacgacatttcacgtcagttagtgctatagctcaggaacaaattttcccgaattgggatatgcccgcaaattgctggtgatgtggggagaatctggttgagttcggtagaattgatttggaggcagaacgcttaaatcgtggcgtcctgaaacgaaaaacggacctccgtggaggtccgtttatatgaatttggtgcccggactcggaatcgaaccaaggacacggggattttcaatcccctgctctaccgactgagctatccgggcaacggggcgcattaaaccgtaatctgcacatctcgtcaacctaatttcagtaaaagcgattcaactgcttaagattgcggcaaatcgcttcttttctgtgtttctgtcaggtcaatgcaccaccctggcggcagcgggcgaagcgcaggatatcttccgccagccgatgtgcagtgtcgacatccgcctggctacgattcaccagcattcggcttaaacagccttccagcaccagttccatctgctttgctaccatcgccggatcgtcaacttccagtgtggttaacagttcgtgggtgaaatcgtaggccgcgcttttttgctgatcggccagttgatgaatagggtggccaggatcgggataaaacgtacaggcagcgataaatagacagcccggatagcggttgtttttaacgcactcgcttaacgcctgataacgtgccagcagcttttgttcggcggtttgcgtttcgtccagcatcagctgacgacgccagacatctatctgttggctaagataacgcagcgcatcgtagaggattgcctctttgtctggccagaagcggcgtagctcgtccagtggataatccacacgttcagcaaccatctccagcgtggtgttggcaatcccttgtaattctaataatttcagggcttctcccagtacatcttcacgttgcacgctattttcctccgtctttcccactgcaagtgtcgttcacggttggcgatcgcgcaaatgtgcgctgaaggtttcagcatccataaagcccgtgacgcgtgcttgtggatgctcctggccttgtccgtcaaaaaagagaattgtcggtaggccaaggacattaagatgctttaacagcgccacatcttgtgcgtcgttggccgtgacgttggcctgaagtaagaccgtgtctgctaacgctttttgcacctgcgggtcgctgaaggtgtatttctcaaactctttacaggcgacgcaccagtcggcataaagatctaacatcaccggtttgcctttggcttcaacgagcgcctgatttaactcatctaccgttttgatttgtgtaaagttgagatgcgtctgagtttgcgcggtatgcgtcgcaccaaatgcccaatcctgaagtgggcgcacgctaaccaatgccgctgccagcagaataatttgcacaatacgcatccagccgcgtttagcctgtaggctggtgataaaggcccagccaaagaatgcgacacccagcgcgctccacaagcgtaatccccatacatcaccaatcactcgctccagcaggaagaccggcagtgcgaggatcacaaaaccaaacgcggttttgacttgttccatccacgggccgcttttcggcagcaagcggttaccaaagacggtaattagcatcagcggcaggcccatgcccaacgcatagagataaagcgtgccgccgcccagccacatgttcccgctttgggcgatatacagcagaatcgcgctaagcggtgcggtggtgcatggactacagatcagtccggcaatcgcccccataacaaacacaccgccaggactgccgccctgttggcgattgctcatcaacgtgagacgtgtttgcaggctagaggggagttgcagggtaaacaagccaaacatactcatcgccagcaaggtaaagacgatggcgaggccaatgagcacgtatgggtgctgtagcgccgcctggaactgtaaccctgcggcggcaaccaccagacccagcgccgtgtaggtcagcgccatcccctgcacataaataaaggtcagcaacaatgctctggcagtggagagccgctgtttaccacccagcacgatgccagaaatcagtgggtacattggcagcacgcatggcgtaaaggcgataccaataccgatcaacaacgcccagagcgcggaaaagggcaattgcgcggtgggctgctcttgctgcggaacagacacaggctgtggcgctgcgttgttggcgaccacttcgcttaacggaacggttttggtttctggcggataacagaaaccggcatcagcacagccctggtaggtgacagttaacgtcgctcccgcactcgcctggttgatggtgacgggaagcgtcagccgatcgcggtaaatctcgcttttgccgtaaaactcatcttcatgccagacgccttgcggcagctgcacgtcggcaattttcgcgtgttccggcgtaatgcggatctgtttacggtagaggtagtaaccgtctttgatctgccaggtcagattaaggtcatgttggttttgctgaaaatcaaaagcaaaggcttgatccgcggggacaaattgactacgtcccggcgcgtcgaataatccggcaaaaacggaagtgctgcaaagtagcaggatcagcgtaaagatgcgttgagccatgagaggtaatctgtgtctccttatgtcagcgtaaagatgcgttgagccaactgaggtaatctgtgtctccgtgtgtaacaggtaaaaccagaagttccggggtttgatatggatgatgagacttcaggcattccagcagtgcctgctggtgagatacggtagtttttaaaatcatctgcacttcgtattcttgctccagcttaccttcccagtaatagagagaggtagcgccggggatcaaggtcgcgcaggccgccagtttttccgccagcactttggcggctaaatcctgggctgtcgcttcatctggtgccgtacatagcaccacgacagacgcggtattgctacttttttcatcaagcataaacacctcgcaagaacagatggaaccgcaagagagaggtcactatacaacggacgggggaaggatgttagtcggcgggaaagaaagcggggcgtgaacgccccgcgattgatcattacagcatgaagctacccagcacgaagccgaagcaaacggccagggcaacacccagagtacccgggatgaagaacggatggttgaagacgaatttaccgatacgggtagtacccgtgtcatccatctgtaccgcagcaaccagcgtcgggtaggtcggcagaatgaacagaccagacaccgcagcgaaagaagcaacagcggtcagcggactaacgttcagtgccagagccatcggcatcagtgcttttgcggttgcagcctgagagtacagcagagcagaagcaaagaagaagatgacggccagcagccacggatgaccctgaatcacttcaccagcggtatctttgatccagtcgatgttgttggaaacgaaagtatcgcccagccacgcaacacccaggatacaaatacaggcgctcatacctgctttgaaggtgctggagttgaggatgttgtcggtatcgactttacagataacggtggtcagagttgcaacgctgagcatgatgatcaggattgcgttggtggtgttcatcagcggtttttcaaccagacccatgcttgggctgttgatgattgcatagataaccacgccaactacgcccagcaggaacagccagacggacgtttttgcaccggatttgatttcaatctgcttttcaccgcgcagttcaaccaggccctcttccagacgcttgcgataaatcggatcgtcagagagtttggagttgaacagcatagtgaccaggaaggacatcaccagaaccgccagcagggtggacgggatgaccacggagagcagatggaggtagctgatgccatgaccttccatcacggaagacatgtaaaccactgccgcactgattgggcttgcggtgatcgcaatctgcgcggataccactgcagtagacagcggacggcaaggtttaacgccttgttccttcgcaacttcagcgataactggcagtgtcgccagagagatgttgccagtaccagcaaagatagtcaggaaataggtcacgatcggtgcgaggatcgtgatgtatttcgggttacggcgcagcagcttttctgtctgatgaaccagatagtccagaccgccagcaacctgcatggcagaaatagcggcgataaccgccatgataatggagatgacatcgaacgggatgttaccgggtttaacgccaatagcggcaagaaccagcacccccaatccgcctgcaaaaccaatacctattccccccaatctggcgcccaagaagatcgccagcaaaactatgatgagttctacaactagcatattagccttccttgttttttaacaagttgatattagattgttatttttaagttactgctcacaagaaaaaaggcacgtcatctgacgtgccttttttatttgtactaccctgtacgattactgttcgctttcatcagtatagcgttttgctttgtaagccgggtgcatcagattctgtacggagaaaatatcgtcaagttccgcttcagtcaacagaccgcgttccagaacgacttcacgtacactcttaccggtttcggcacagattttacccacgatgtcaccgttgtggtgaccgatgaacgggttcaggtaagtaacgataccgatagagttgtaaacgtaaccttcgcacacttctttgttagcagtgatgccgttaatgcatttttccagcaggttgtagcaagcgttggtcagaatgtgaacggattcgaacatggcctggccaatgaccggctccataacgttcaactgcagctgacctgcttctgctgccatggtaacagtggtgtcgttaccgatgactttgaagcatacctggttaaccacttccggaacaaccgggtttactttagctggcatgatggaagagcccgcctgcagttccggcaggttgatctcgttcaggccggcacgtgggccactagagagcaagcgcaggtcgttacagattttggacatcttcacagccaggcgtttcagcgcgccgtgaaccataacataagcgccgcagtcagaggtcgcttcgatcaggtcttcagccggtacgcatgggaagccagtaacttcagccagttttttcactgccagcggagagtactctttcggcgtgttcagaccagtaccgattgctgttgcaccaaggttaacttccagcagcagttcagcggtacgttggatgtttttcacttcttctttcagcaggatgctgaaagcgcggaattcctgaccgagggtcatcggtactgcgtcctgcagctgggtacgacccattttcaggatgtcctggaattcgacagctttacgttcaaagccttcacgcagttggttaatcgcatctaccagcttaatcagggaagagtaaactgcgatacggaaaccggtcgggtaggcgtcgttagtggactgacatttgttaacatggtcgttcgggttcaggtactgatattcacctttttggtgacccatcagttccagaccgatattggccagcacttcgttggtgttcatgtttacggaagtacctgcgccgccctggtagacgtctaccgggaactgatccatgcattttccgttgttcaggacttcatcacatgcggcaatggtggcattcgctacacttttaggaatggtttgcagctctttgtttgccatagctgcggcttttttaaccattaccataccgcgaacaaattcaggaatatcactgattttgttgttgctgatatagaagttttcaatcgctctcagagtgtgaacaccatagtaggcatcagctggaacttccctggtacccaacagatcttcttcgatacgaatgttgttactcatgtgaaccttctttttcaagctgccaatgatttgctttaaacacacagaatatatgtggtttcgaatgtttttcgaccgacgattatcccctgcatcgaccgaatacccgagatcatatgctgcttgaggatttctaccgtaatctggatcactttaagtgtcggtttttaccccttaattattaatttgtgaaatagatcaccgctttgggattactaccaaaaatagttgcgcaaacatcttgaaattttgctaatgaccacaatataagctaaacgcgattcgcaacccattcaggtagccggggttaaccggctgctattacaggagaaacctttgcgctggttaccttttattgccattttcctttatgtctatattgagattagtatctttattcaggttgcccatgtattgggggtattgctgaccctcgtgctggttatattcacgagtgttatcggtatgagtctggtacgtaaccagggctttaagaatttcgtgctgatgcagcaaaaaatggcggcgggtgaaaacccagcggcggagatgattaaaagtgttagcctgatcattgctggtttgctgcttttattaccgggcttttttaccgacttcctcggtcttctacttttattgccgccggtgcaaaagcatctgacagtgaagttgatgccgcatttgcgcttttctcgcatgcctggcggcggttttagcgccgggaccggtggcggtaatacttttgatggtgagtaccagcgaaaggatgatgagcgcgaccgccttgatcataaagacgatcgccaggattaatgtcgaaacgccggattatgtggttatgccattttccggcgtttttcgttttggcagcaacagccataaccccgccagcatgatcagcgcatagagacttttccagccgaccattgccagtaacagaacgcataacagcccgccaaccaccgccagtagtcgataacgtccttgcaataatttacagcctgccagcatgcataacagataaatcataataaagatgccattggcataaataataagagcgtccagattgatctctaaagcatgaatcaccaaagtgctcaccacacagcagccgagcaccgcattgagggcattattcgggatatggcgagaagagaggcgtgccaggtagtggtcaggattatgttgcgcctggctccagaccaggcgggcgaagctctgtatataaatgttgagactggcaaagcaggccagatagccaatcacgcaggcaatccataacgctcctacaccgaacaactgcactacaatttttggaaggcttgctgccgccgccattttttcaccataggcgtcgaagtgtaagacgactaccgtacagccccagtagactaatcctgccagcagcagaccaatcatcaaagcacgaggaaaatcacgctctggatttttaaattcgctggcgagatgggcaaatgcctccagaccgacaaaacaccagaacatcacacttaacgcagcaaataacccggtaagttcgatattaccaggtgccggaaaggggatattcgcaggtttgatatcgcccgcccaccagatagcgacaatcagcgcgacgataagtccggcaataacggtttgtagattagcactggaactggcaccgcgagtaccgatataccacaccagcgccagcgtaccgagttctgccaacaacagttgccagctatgccagccaaacatcgcctggccgaacccggcggcaatttgtagtgcggcaggcaaacccacgggaatgacgcttaaaaacagccagccggtgactcgctcaagccggctaccaaacgccataccgacgaagtgcgcgacgccgcctgcgctgggatagtggcgacccagaatcgcaaacacaatcgcaatcgggaacactaagataatcaaaacgggccacgcccacaggctgttattgcccgctaccagcgcagctaacgcaggaacggcaaacacgccagtgcctaataaactcgtgcttagcaggccaatgccctgggccagccccagttcttgtttgagtccactcatgggttgatgtccgattgcgcccaaattttgggcaactgcgtagattttcgatggtagcacaatcagattcgcttatgacggcgatgaagaaattgcgatgaaatgtgaggtgaatcagggttttcacccgattttgtgctgatcagaattttttttctttttcccccttgaaggggcgaagcctcatccccatttctctggtcaccagccgggaaaccacgtaagctccggcgtcacccataacagatacggactttctcaaaggagagttatcaatgaatattcgtccattgcatgatcgcgtgatcgtcaagcgtaaagaagttgaaactaaatctgctggcggcatcgttctgaccggctctgcagcggctaaatccacccgcggcgaagtgctggctgtcggcaatggccgtatccttgaaaatggcgaagtgaagccgctggatgtgaaagttggcgacatcgttattttcaacgatggctacggtgtgaaatctgagaagatcgacaatgaagaagtgttgatcatgtccgaaagcgacattctggcaattgttgaagcgtaatccgcgcacgacactgaacatacgaatttaaggaataaagataatggcagctaaagacgtaaaattcggtaacgacgctcgtgtgaaaatgctgcgcggcgtaaacgtactggcagatgcagtgaaagttaccctcggtccaaaaggccgtaacgtagttctggataaatctttcggtgcaccgaccatcaccaaagatggtgtttccgttgctcgtgaaatcgaactggaagacaagttcgaaaatatgggtgcgcagatggtgaaagaagttgcctctaaagcaaacgacgctgcaggcgacggtaccaccactgcaaccgtactggctcaggctatcatcactgaaggtctgaaagctgttgctgcgggcatgaacccgatggacctgaaacgtggtatcgacaaagcggttaccgctgcagttgaagaactgaaagcgctgtccgtaccatgctctgactctaaagcgattgctcaggttggtaccatctccgctaactccgacgaaaccgtaggtaaactgatcgctgaagcgatggacaaagtcggtaaagaaggcgttatcaccgttgaagacggtaccggtctgcaggacgaactggacgtggttgaaggtatgcagttcgaccgtggctacctgtctccttacttcatcaacaagccggaaactggcgcagtagaactggaaagcccgttcatcctgctggctgacaagaaaatctccaacatccgcgaaatgctgccggttctggaagctgttgccaaagcaggcaaaccgctgctgatcatcgctgaagatgtagaaggcgaagcgctggcaactctggttgttaacaccatgcgtggcatcgtgaaagtcgctgcggttaaagcaccgggcttcggcgatcgtcgtaaagctatgctgcaggatatcgcaaccctgactggcggtaccgtgatctctgaagagatcggtatggagctggaaaaagcaaccctggaagacctgggtcaggctaaacgtgttgtgatcaacaaagacaccaccactatcatcgatggcgtgggtgaagaagctgcaatccagggccgtgttgctcagatccgtcagcagattgaagaagcaacttctgactacgaccgtgaaaaactgcaggaacgcgtagcgaaactggcaggcggcgttgcagttatcaaagtgggtgctgctaccgaagttgaaatgaaagagaaaaaagcacgcgttgaagatgccctgcacgcgacccgtgctgcggtagaagaaggcgtggttgctggtggtggtgttgcgctgatccgcgtagcgtctaaactggctgacctgcgtggtcagaacgaagaccagaacgtgggtatcaaagttgcactgcgtgcaatggaagctccgctgcgtcagatcgtattgaactgcggcgaagaaccgtctgttgttgctaacaccgttaaaggcggcgacggcaactacggttacaacgcagcaaccgaagaatacggcaacatgatcgacatgggtatcctggatccaaccaaagtaactcgttctgctctgcagtacgcagcttctgtggctggcctgatgatcaccaccgaatgcatggttaccgacctgccgaaaaacgatgcagctgacttaggcgctgctggcggtatgggcggcatgggtggcatgggcggcatgatgtaattgccctgcacctcgcagaaataaacaaacccccgggcagaaatgtctgggggtttttcttttggtcatctttctagtataagattcagacacggacgacgcgagtggcgtccagctcattgattatggggaataacatgcacgtaaaatacttagcagggattgtcggtgccgcgctactgatggcgggttgtagctccagcaacgaattgagtgctgccggtcagagtgtacgcattgtggacgagcagccaggcgcagagtgccagctgattggtactgcgacaggtaagcaaagcaactggctttccgggcaacacggagaagaaggcggttctatgcgcggcgcagcaaacgatctgcgcaaccaggcggctgcaatgggcggtaacgtgatttatggcatcagtagcccgagccagggaatgttgtccagttttgtcccgacggatagccagattatcggtcaggtttataagtgcccgaactgatgtgatccagaggctgggtgacaaacgtataattgcctgatgcgcttcgcttatcaggcctacataaggcattgcaactgattgaatgcttgagaatttgtaggccggataaggcgtttacgccgcatccggcatgaccaacgatcacgttatcagtcatttcaggctggatggctccagcctcgcattagcaaagatgagattatttcgcctgtggtgcagttttgctggtggattgaacacgtaagtgatgcagcgcgcgtaagcattgatcctgggttagcggttgggcgttattcgccgctacggtgcgaacatagacctgacatggcacacccgcgagttttttcagtcgtgggctgaaatcaagcattcggcgagtgatcgcttctatttctttacccggcgttgcttcacgcgttttcaccactgcgccgctaaattgttctttgccactttcatctttaaagcggtaaagcaccgccagataatggtcgaacaagttatgtttccattccggttgggaataggtgtcatattccagattgccattgtcctggcagtcaacgtcgtataacggcaggaaatctaacagactggtaatacgtaatgccagttcacgcatttccgcattattaattgcatgaatgattgctcgcgccagcatttcaatctgcaactcattgacgactaactcacatttgctaccgtcatgtagcgttaatacgaaggtaagattttcgccttgattatcggtaagttccagcgtgttaacccgacgattaatatcggcatttttaagctcatcaaccagaatttctgggatgttttctgccattttcttaatgactttatcgcgagcttgctcatactgaaggtgtgcagcagcatccagtttatgcttttgatgcagacgactttccagcgcaatcagcaggtcgcgcagttccatgacagacataaagaacaagctttctttattgcgaggttctttaattttcagcgccagtgcaatgaaattattactcttgcgaataacaccggtattaacacccttgatgcttatggccatgtaggttctccctaaccatttctcaattaaataattaattttaatttataagccagataaatgggcttggtagtaatagttgttaaaataacataaatagccgtactcactctatataaacagaaaagaaaggttaattattggtgttagctatataaaaagtaacaacagcaatgcatatgaataattaaaggttatgcaacgggcaaagattaaacttcccagtttaatgacaggttgctgtacttgcgtttgttgctcttgccggatgcagcgtaaacgccttatccggcctacagttcattgcaaatccattcaatttcaatgcacgatgtaggcctgataagcgtagcgaatcaggcaattttaatgtttaacttccctgtttaatcagttactgctggcgtagctggagatccagcggcgttttgctgggttcgccgccaatttctcgcgccagtttcggcaccagatatccgctcaccagtgtcagcaactcacgcataatctgccgtgcttcgtcatcactcaccataaaatgcgccgcgccctgtactttatcgagcacatgcaggtaatacggcattacgccggcatcgaacaacgcattactcaggtttgccagcgtttgtgcgttatcgttcacatcacgtaacagaacgctctggttcagcaaagtaacgcctacccggcgcaacttagccatcgcctgacggaatgtttcatctacctcattggcatggttgatgtgattcaccagcaagatttgcagcgtagaacgggcaaagcattcaaccagcgcctcggtgatacgtgccgggatcacaatcggcagacggctgtgaatccgcagacgttttatatgcgggatggcttccagttgtgtgagcaaccagtccagctcgtgatctttcgccatcagcggatcgccgccggagaaaatcatctcgtccagttccggatgcgcagcaacatactcaagtgcagtttgccagttacgcttgttgccctgattttcggcataggggaagtgacgacggaagcaatagcggcaatttaccgcgcagccgcctttgaccagcaaaagcgcccggttgtggtatttatgcaacaaaccaggcactacgctgtgctgttcttccagtgggtcggtggagaatccgggcgcgatgacaaactcatcttggctggtaagtacctgacgcaaaagaggatcgtccggattgcctttctccatgcgatcgataaaactgcggggcacacgcagggcaaaaagctttttggcgctgcgtccggctaacagtttttcctccgcgtctatattcaaaagacgcagaagttcatcaggatcggtcacaacatcggcaagttgcgttaaccaatcttctctggatggggtatttagggttacaatatgcgccattttgtggcttagctaccaattaacaaatttcagagggccttatggcaacgtactatagcaacgattttcgtgctggtcttaaaatcatgttagacggcgaaccttacgcggttgaagcgagtgaattcgtaaaaccgggtaaaggccaggcatttgctcgcgttaaactgcgtcgtctgctgaccggtactcgcgtagaaaaaaccttcaaatctactgattccgctgaaggcgctgatgttgtcgatatgaacctgacttacctgtacaacgacggtgagttctggcacttcatgaacaacgaaactttcgagcagctgtctgctgatgcaaaagcaattggtgacaacgctaaatggctgctggatcaggcagagtgtatcgtaactctgtggaatggtcagccgatctccgttactccgccgaacttcgttgaactggaaatcgttgataccgatccgggcctgaaaggtgataccgcaggtactggtggcaaaccggctaccctgtctactggcgctgtggttaaagttccgctgtttgtacaaatcggcgaagtcatcaaagtggatacccgctctggtgaatacgtctctcgcgtgaagtaatgcggttgtggtgcggcctgcaggctgcaccatcacttattcaggtcagagatgatgaaacgccttatcgttcttgttttgcttgccagcacgctgctcacgggctgtaacaccgctcgcggtttcggcgaagacatcaaacatctcggcaactccatctctcgcgctgccagctaatttttcttctcttccgaaaaatcatcagattcccatcatttttggcgatgttgtctattattaatttgctataggcaaacataaataacattacctaaaaggaagacgttatggtgaagaagacaattgcagcgatcttttctgttctggtgcttagtacagtattaactgcctgcaacaccacgcgtggcgttggtgaagacatttctgatggcggtaacgcgatttctggcgcagcaacgaaagcgcagcaataagcaataacggtacgacagctgtgtcgtgccgtttgttttttctgcgatagtcacaaaggtaatagttgaaattcccctgccacctggcaaaatatccgttcaaccatcagctttgcaggacgacctgcaaacgcctcttttcaccggggacggccccaattctccggagcctgatatgtcctggattatcttagttattgctggtctgctggaagtggtatgggccgttggcctgaaatatacccacggctttagtcgtttgacgccgagtgttattactgtgacggcgatgattgtcagtatggcgctacttgcctgggcgatgaaaagcttaccagtagggacggcttatgccgtgtggacgggtattggcgcagtcggcgcggccataaccggcattgtgctgctcggtgagtccgctaacccgatgcgcctggcgagtctggcgttaatcgtattggggattattggtctgaaactcagcactcattaactaccaggctgctgtacccaaataaatttactgacatcaaacccttcccgggtcgcgactgccagcatctcctgtttcacttcgtcagaaatggttggcgtgcgggagagtatccacaggtagtcgcggtccgggccgcaaaccagcgcatggcggtattcccgatcgagtgcaataacgttataaccgccatagaaaggaccaaagaaactcactttcagcgcagcgcgagttggtgcgccggtaaagtacgctttcccttcactctgctgccacattcctctgtcagggttatagcctttattaatgacattcaggccgccgtcatcacgcaggctgtatgttgcggtgactttttccagtccacgttcaaagcggtgatcaaaacgggcaatctcataccaggtaccgagataacgtttggcgtcgaaattatttactacggtcacgccacgcggcggcgtaggagaactgcaggcaacgaccagaaatgcagctgtcgctgcggcaacgagagggagcaggcgcataaatgtttccttactggtttttttctaagtgtagatgacagcaaggaaaagcggagaaaaggtccgaaaattcggacccgatggaattttactgtagagcgttaagaatctgccaggcggcgtcgactctcgctggattgggatagtttttgtttgccagcatcacgatacccagctctttttctggaataaacgcgacatagctaccaaatccgccggtcgcccctgttttatgtacccaacttgcgcgtactgcaggagttgggggcgtaatcgcttttacggggcgtgctgccagtgcaattttattgtcactgccgttaatgatgctgtcaggatttaccggccagtccagcatttcccagcccaggccctgatacatatcgccggtttgccagtagcgagattgtgccagttgtatcccttgttgaagcgttttctcattgatatcaaggggttttaaattgctttgcacccagcgggccatatcttcaatggtgctcttcacaccataagcttcagcatctaacgccccagggctaacatgcactgccttaccttcgcgatatccccaggcgtaattcttttcttctgcgggcggtacattaatccacgtatggttgagtttgagtggctggaagacacgagtttgcatcgcctgctcaaaactcaaaccagacggcttcacagccagtgcgccgaacaaaccgatactggagttggcatacagacgttgtgttcctggagcccatgcaggctgccagttttgatagaagcgcagcaagtcgctactggatttcacctcatccggcacctgcaatggcaggccgccagcagtgtaggttgcgagatgtaatagtgtgatcccattccactgtttagcggtaagttcaggccagtattttgttgtgggatcgcttaacttgatttcccctcgagcaatagcgtcgccaccaagcacgccagtaaatgttttgctgacgctacctaactcaaacaacgtttgctgtgtgacgggctgctttttggcgatgtccgcatagccccaggtaaagtaataaggtttaccctgataaattaccgccaccgccatacccgggatcttttgttgctctataagcggggtaattgtgcgatgcacaatatcgttgatttgttgaggggcagcaaatgtggagcaagaggcggtaattaataaggcgcagagcgtcgttttgaacatagggtctggtttccatacaaaacggcccgccataggcgggccggatttacattggcgatgcgttagattgtaacgacaccaatcagcgtgacaactgtcaggatagcagccagaccgtagaaaacccatttgcccgcaggtacgtggattttcagatcgtgcatcgcgtggtgcatacggtgtaaaccacaccacagcggcagaacgatcatcaggaacaggaatacgcgaccaatgaagctctgcgcgaacgccagaacgcgctcgtagctcagcgcatcacccggaaacaaccccagtggcagcagaatacccaccagcaggatcatcaccggcgcaatgatggcgctccacataccaccggccccgaagaggccccagaataccggttcgtcagaacgctttggatttggattaatcatctcaggctccttaccagtacagggcaacaaacaggattacgatggtggcaaccacagttaccgcccagagacttttgataattggctctggtcccattttttcgtcttttacaatgatattggccgctttcggtgccagttcaaaccaggttttggtgtgcagcagagctgccgccagagtgatcaggttaatgatcacgataaccgggttttgtaaaaagtcgacgaatcccgcccaggcttccgggccatttttcagggcaaacagcccgaaaatcagttcaatgctgaaccacacagccggaaccgccgtgccttcgcgcagcatgtaaaagcgataaaacggcaattttttccaccaggtggacgtcattggccgtacatacggtttacgtttagtcgtcatgttgcactccttagcgtggtttcagggtcgcgataagaaagtctttgctactttctactttgccctgctgaatggccgcagccggatcgacgtgtttcgggcagacttcggagcagtagcccacgaaagtacagctccatacgccgttctggctgttcaactgcgccatacgctccttcttaccgtggtcgcggctatcttcgttataacgatgcgccagcgtaatggcagccggaccgatgaactctgggttcaggccaaactgcgggcacgcggcgtagcacaaaccacagttgatgcaaccggagaactggtgatacttcgccatctgcgccggggtctggatgttagtaccctgatccgcggtgcgggagttgccgatgatgtacggtttgatcgcttccagactttcgatgaagtgggtcatatcgaccaccagatcgcgttcaatcgggaagttagctaacgcttcaaccttcataccgtcggtgtaatcacgcaggaaggttttacatgccagttttggcacgttgttaaccatcatgccgcaggaaccacaaatcgccatacggcaggaccagcggtagctcaggtccggtgccaggttgtctttgatgtagcccagcgcatccagtaaactggtagttgcgtcataaggcacttcatagaatgcgctatgcggtgcggtatcgacttccgggttatagcgcaccacctcaattttcaggtttttcatctcagccattcgccttctccttcttattggctgcttccgccttatcggctgcatccgcttcgccaccgtaaacgcgtttagctggcggcagcgtagtaatcttcacgtcgctgtactccaggcgagtcgtgccatcagcatcgcggaaggcgagggtgtgtttgaggaagttgacgtcgtcacgctcggtgcaaccttcgtccagacgctggtgcgcgccgcgggactctttacgtgccattgcggagtgcgccatacattcagcaacgttcagaccgtggcccagttcaatggtgtagagcaggtcggtgttgaacacgctggaagtgtcggtgatgcgcacgcgcttgaagcgttcctgcagctctgccagcttgtcgatggttttctgcatcagttccggcgtacggtagataccgcagccttcttccatagccaggcccatttcgtcgcggatcttcgcccagttttcgccgccatcctggttaaccagatctttcagacgttgttcaacgccagctgcctgcgcttcaattgccgcttcgttgccattaccggcagttgctgcacgctctgtcgcttgttcaccggccagacggccgaagaccaccagttccgccagggagttagaacccagacggtttgcaccgtgcagaccaacagaggaacattcacccacggcgaacagacctttaatgcgggtttcacagttctgatcggtttcgataccgcccatggtgtagtgtgcggtcggacgtaccggaatcggttctttaaccggatcgacgccaacgtacgctttcgccagttcgcagatgaacggcagacgttcatgcagttttttctcgccgaggtgacgcaagtcgagataaaccacatcgccacgcggcgtggagatggtgttgcctttacgccattcgtgccagaaggcctgagagactttgtcgcgtggacccagttccatatatttgtttttcggctcgcccagcggagtttccgggcccatgccgtaatcttgcagataacggtagccatttttgttgaccagaataccgccttcaccgcggcaaccttcggtcatcaggataccggaacctggcagaccggttgggtgatactgaacgaattccatgtcacgcagcggaacgccgtggcttagcgccatacccataccgtcaccggtaacgatgccgccgttggtgttgtaacgataaacgcgacccgcaccgccagtagccataacgaccgcgttagcacggatctgcaccagcgtgccttccatcatgttcattgctaccaggccgcgaacatgaccatcatcaaccagaatatccagcacgaaatgttcgtcaaaacgctggatctgcgggaattgcagagaggtctggaacagcgtgtgcagcatatggaagccggtcttatcggcggcgaaccaggtgcgctcgattttcatgccgccgaagcgacgtacgttgacgctaccatccgggcgacggctccatgggcatccccacagttccagttgggtcatttcggttgggcagtggtggacgaaataatccacgacatcctgctcacacaaccagtcgccacccgctactgtatcgtgaaagtgatattcgaagctgtcatgatcctgcgcgacagcggcggagcccccttctgcagcaacggtatggctacgcatcgggtatactttactgattagtgcgatttttgcattcggatttgcctgcgcggcagcaattgcagcacgtaatcccgcgccaccggcgcctacaatggcaagatcggcttgaaaggtttgcacgacattcctccagattgtttttatcccacagccacgtacttcagggtaagtacctgaaagttacggtctgcgaacgctattccactgctcctttataggtacaacagtatagtctgatggataagtctgaaatttgacgagatcgatttttttagtgcgcaagagggctaaattatcactgaagatgattaatttaattactaaaccatcagatcgtgctttttttagtcactgcccaccgctgtttgattcctgcgtaaaatttgtctcgccgtcgcgttgcgagtagacttcgtgcccttgtcaaaaactggagatttaactatgagcgaaacggcatcctggcagccgagcgcatccattcctaacttattaaaacgcgcggcgattatggcggagatccgtcgtttctttgccgatcgtggagtgctggaggtggagacgccttgtatgagccaggcgacggtaaccgatattcatttggtcccgtttgagacacgtttcgttggccccgggcatagccaggggatgaatctctggttaatgaccagcccggaataccatatgaaacgcctgctggttgccggttgtgggccggtattccagctgtgccgcagcttccgtaatgaagagatggggcgttatcacaaccctgagttcactatgctggagtggtatcgaccgcactatgatatgtaccggttgatgaacgaggtggacgatctcttacaacaggtgctggactgcccggcagcagaaagcctttcttatcaacaagctttcttgcgttatctggaaattgacccgctctctgccgacaaaacgcaactgcgggaagtcgcagcgaaactggatttgagcaatgttgctgataccgaagaagaccgcgacacgctgctacaattgctgtttacctttggcgtagagccaaatattggcaaagaaaaaccgacctttgtgtaccactttccagccagccaggcaagtctggcgcaaatcagtaccgaagatcatcgggtcgctgaacgctttgaggtttattataaaggtattgagctggcgaatggtttccatgaattgacggatgcccgtgagcagcaacaacgctttgaacaagataaccgtaagcgcgcggcgcgcggtttgccgcagcaccccattgaccagaatctgattgaagccttgaaagtcggtatgcctgactgttccggcgtggcattaggtgttgatcgtctggtgatgttggcgctgggcgcggagacactggctgaagtcatcgcctttagcgttgaccgggcataattctgaaaaattactgaattaacagcgaagaatggcgtgataagcgccattctgtagcatatgttttcatttttccgttaaaggccacaatttaagactggatatttgatatcatccaggtatcaattctgtattggtttttacgctgcctgctcaatgttgcgcagtgcagttcagtgggcacgtgttatacacgcgctgaaatgaaggatggtttcatgcctcacacgataaaaaagatgagtctgataggactcatattgatgatctttacttccgtatttggatttgccaatagcccaagcgcttattacttaatgggttatagtgcgattcccttttatatattttctgcattgttattctttattccattcgccttaatgatggctgaaatgggagctgcttatcgcaaagaagaaggcggtatctattcctggatgaataatagtgtcggaccacgttttgccttcattggtacgtttatgtggttttcctcttatatcatctggatggtgagtacctccgcgaaagtttgggtaccgttcagtacattcctctatggtagcgacatgacccagcactggcgtattgccggactggagcctacgcaggtggttggtctgctggctgtggcatggatgattctggtcaccgtcgttgcttctaaggggattaataaaattgcccgcattactgcggtgggcggtattgcagtaatgtgtctgaatttagtattgctgttagtaagcattactattttgttattaaatggtgggcatttcgcgcaggatattaatttccttgcaagtccgaacccgggttatcagtccggtctggcaatgctaagctttgtggtatttgccatttttgcctatggcggaattgaagcggttggtggtctggtcgataaaacggaaaatccagaaaagaactttgccaaaggtattgtttttgccgctattgttattagtatcggttatagcctggcaatatttttatggggcgtcagcacaaactggcagcaggtattaagtaatggttccgttaacctcggcaatattacctatgtgctgatgaagagccttgggatgacgctgggtaatacactgcatttgagtcctgaagcgagtttgagcctgggcgtatggtttgcgcgtattactggacttagcatgttcctcgcctataccggtgcgttctttacgctttgctatagtccgttgaaagccatcatccaggggacgccgaaagcattgtggccggaaccgatgacgcgcctgaatgcgatggggatgccgtctatcgccatgtggatgcagtgcgggttggttactgtcttcatcctgctggttagctttggtggcggtaccgcaagcgcgttctttaacaagctgacgctgatggcgaacgtgtctatgacgcttccttacctgttcctcgcgctggctttcccgttctttaaagcacgtcaggatctcgacagaccgtttgtgattttcaaaacgcatttgagcgcaatgattgcgacagtggttgtcgtactggtggtgacatttgcgaacgtcttcaccatcattcaacctgtggttgaagccggagactgggacagcacattgtggatgattggcggccctgtcttcttcagcctgttagcgatggcgatttaccagaactattgcagcagagtggcaaaaaatccgcagtgggcggtggaataacccgatgccctatcgtctacctgacgatagggcgtaaagacaggaaatgttatggatgacaccagccgggacccggcaataaccgaagatgaaatcagggcgctgcaattttctgccggggatgtagcggaaatagagcagacgattctctcttttgtcgatgcctgccacacccgtaaagtggcgatggtggtgggtagcaccattaacaccctcaaagatcgcgatggtaaacggtggggaaacctgccggatatttattgcgcttatcttatccgatgtctggtttttcgcggggaattagtgggatacggcgatttgtttcgtatgcgctatagcgaaattaagcgaccggttaccttatgagtgcgcgcatgtttgtcttatgctgcatctggtttattgtggcgttcctctggataaccatcacttccgcgctggacaaagagtggatgattgatggacgcgggattaacaacgtctgcgatgtgttgatgtatctcgaagaagacgatacccgtgatgttggtgtgataatgacgttaccgctctttttcccttttctctggttcgctttgtggcgaaaaaaacgcggctggtttatgtacgccaccgcgctggctattttcggctactggctgtggcagttttttctgcgctatcagttttgtttgtgagccggattggttcatccggcacacaaacttacaaacttcccgcctgacgacctttgcccgcagacgtcagcgttctccccgtttgtttaccgttgaggctttccagacgcatctggaagggcgggaatggcatatcgataccgtgggcatggaagccagccagaatcagctggtggatctcatggcgtagcggcatacggtgacccatctcagcggcgtaaatacgcagctcgaaaatctgaatcccctgttgcagatccaccaggaagacttccggtgccgggttgtcgatcaccaggctgcagcgacgcgctgcggtgagcaggatttccgtcacttcttcgctattggcatcggcaggggccggtatcgtcaacaccacgcgcgtgacgctgtcagagaggctccagttgataaactgctcggtaataaacgccttgttcggcacgattatctctttacggtcccagtcgctgatggtggtggcgcgggtgttaattttcgtcacgctaccggtgagatcgcgaattgtcaccgtatcgccaatgcgaatcggtttttcgaacaggataatcagaccagagataaagttggcgaaaatttcctgcaaaccaaaaccgagaccaacaccgagcgcggcaaccagccactgcaatttgctccactcaataccaatcatactgaagccgaccagcccgccaatcagcatcagcagatatttggtgatggtggtgatggcgtaacccgtacccggcgttaaatccaggtgctgcaaaatcgccagttccagcagcgcgggcaagttgcgcaccagctgcgtggtgatgataaacaccagaatggcaatcagcaccgcaccgagggtaattggctccagactttctacgccctgtaccgtggaggtgacatcccacaggctaatattttcgaggaagccgaaagcggaatggatttcactccacagcacaatgacagaaagcagggcgatcaacatcaaaatactgcgcaccagccgcaaggattgcgcactgatggcatcgagatcgacttcgctttcatcgacttcaattgctccttccgggctactgtgatgatgcgcttcctcttcgccacgcgcacgttgcgctaacatctctgcccggcgatgcttcgcccgatcaaacgccagcctgcggcgctggatcagcatccagcggcggataacgtgataaaccaccagtagcaggaaccagatggcaacgctggtttcaagcctcgctaacagcgcctgtgccgttgccagataacccaccgcgctcgccagaatggcaaccaacggcgcgccaatcatcatgttccacagcatatggttggtaatgttgtcgccgctgccctctttgttgagatacagcggaatcccggcctttttcaggctgagggtgaccaccgccagcgcaccgcaaatgaggataaagcaaagccgtcccaggctaccggagaattcacggtcgtcgaggttatcgaacatcatcagcgccataatcagcggcacaataagcccgatgctcatcaggtagtagcgcatcccacgggaaacacgttcgcgcggccagccaaaatgagcgataaacaagccgttcgggcgggcaaaggtggcgcaaatcatcactacccacagcagcggcacggtggccgttacaccatcgccaatcgcgaccgccagcggataaggccacgcctcgcgcaagccgtaacccagcgtcatccacagcaccggtaacggactcgcgacgagaatgctccagaaaagagtgcgcaacgtcagccagaagtgatcctgagtcactttgccaactttcgccgcgctacgttcaagaaaacgggtgaaatagcggcggctgtaaatactgcaaccgaccagaatcaacgcgccaaacagcggcaaaattgtctctttgctggtcagcatcatcacactggctttgcccaactgactgaaggtgtccaggctaatgagacgacgcagatcctgggcgatttccagcggccaggcgatggtcatcgggcgcacgtcagaggtccagaacagatagcggtgcgttgcttcgttcacctctttcagcgcatcctccagttgcccgttggagactttcagcttggtcagttccaatagtagcgtgtcgccaccctgcaacaaactgttcagcaactcacgctgagtgcgcagttgtgcttccagaatacggttttgctcggcagtcagcggctgaccgtcggcctgatgaatttgccgtagcagcggctgtttattaagcagatcctcataacgtaaccgttgcacacgcaactgcgccatttcggtatcaagctgttgtggtttcggcatttccggcagccgtgccacctgcgcccgcagcgcttcgccgagcagattggagcttcccagccattggctctgttcacgcagcgtattcaacgcctgccggacctgtaacgtctggctggcagcctgacgctgttggctggcaacgagatccatccgctgcgcctgttgattcaaagccgcgcttagttcgcggttaattttgaattgcgcgacgatatctttcggcaaatcggcgctgttttctgccagcaattcggtactttccagcgcccgctccgcctcaagctgacgttggctgtttaattgattacgcaaggcctgcaaatacgcatccagttgctggctctctttttccgccagctcactgcgtaagcgcgctaattcctggcggttattggcagacagctgcgccagctccagttcatcaacgagcgccttaagacgtgcagagtcagactgcaacgcgaaattttgtgcctgattgagcggagtattgccggtaagcgttcccaggcggcgctcgatctcatttaactgacggcgggcgtcggtttgctgttgcggcagttgattcaggctatcggcaatctcgcgggcgcgctcctgctcttgctgggcctgacggcttttatccagcaactggctgctgacctggagaatttcctgattcagcgcgtcggtagacattcccgggctcacgctgcgcggctcgtcacgcatgttgtttaattgtgcgcgcagagtagcggagagtttcggataattatcgataacttgctgatattgtttgatgcgctcaagggaaccttttcgttcctcaagcgcatttaaggcagactggagcgcctctacgacttccggctgtgcgggtttcgccgcttttgcctgctccagttcctgagtgatttgtttgctatcgggggccgtcgcggcgtacgccccccaactgaggcaccaggccatcagaaaagtgataatcaggcgcacgtcagcgtttcctttgatggattagacctggtcttttttgtcgtcaaccaatgggctggcgtcgtgttctgcttcgatctcttcagcaggaagcggggcaggttcagcgtctggcgtaacaaaggtttcggtagatactgccagcggctggccaattttcgtgacagacaggctttccagttgctcaaccagattcactttacccggtgcaaacaggttgataacggtggaaccgagtttaaagcgacccatttcctggcctttcagcagtgccacagaaccgtcgttttccccggcaggccaggtccagcgcttgatgataccttcgcgcggcggcgtaatggtgcccgcccagaccgtctcaatgctgccaacaatcgtcgctccgaccagaatctgcgccattgggccaaattcggtatcgaaaaggcaaatcacgcgttcgttacgggcaaacagattcggcacgttctgagccgtgagatggttaacggagaagagatcgcccggcacgtagatcatctcacgcagaataccgttgcacggcatgtgtacgcggtggtagtcacgcggggagaggtaagtggtcacaaacgtaccgttgcggaacaggtccgccatcagatagttgcctgccagcagggcttcgaggctgtagttgtggcctttggcttgcaggattttatcttcttcgattttacccaactggctgataacgccatcggcaggcatgaccagtacattcggatcggtatcgattgggcgtacttcgtcacgcagcggacggacaaagaattcgttaaaggtgcggtagctggcggtgtccggcttttgcgcctctttcatgtcgaccttgtagtatttaacgaacagatcgataaccagttttgtcagccatcctgcccgcttgcttgcgccccaacccgccaggcgagtaagccatagtttcggcagaatgtactgtaggctaagtttaaaactatttaacaaggtagcctccaggccattgttttgtcgttcctgatccggcctacatgccggatcctgaaaaaaaggggacgattctaacgacggttagcttaattgtcagtcatccgtatcagaaaagtttttacgcgtttttacctgcgccatgctttccagaatacggtgatagttttcgaaacgggtttccgcgattttcccttcctcaaccgcttcccggatagcgcagcccggatcggtatcgtgtttgcaatcgcgatatttacacagacctaaatagtcatggaattcgacaaagccctgagtgatttgttccggctccaggtgccagaggccgaactcacgcactcctggggagtcaatcacatcaccgccgtgcgggaagtgatacagccgagcggcggtcgtggtgtgctgaccgagcccgctgttgtcagagatatcgttggtcaggatctctttttgcagccccagcaacgcattcagcaggctggatttgccgacgccagactgcccggcaaaaatgctgatgcgcccggtcaacgcctcttccagcggttttagcccatcctgagtatggctggaaaccatcaatacgcgataaccgatattgcggtagatatccatctgctcgttgacgaacgccatgccttcgtcgtccagcaggtctatcttgttgagcacaataatcggctcaatctgcaaggtttcgcaggccaccaggtaacggtcgataatattgaggctcagctccggcaaaatggcggagacaatgacaatctggtcgatgttggcggcaataggttttacgccgtcgtagaaatccggacgcgtcaacacgctggtacgctcatgcaccgcttccacgatccctttgacatttacgccttccgccgccggtttacccggacgccagactacgcggtcgccggttaccaggctacggatggtacggcgaatattgcagcggtgaacgtcgccatcggcggattccacatcagcgtgcataccaaagcggctgatgacgataccttcatcaggctcgccaaacagattgtcgtcgtagtcgggcttctccttagacgttttaagacgacgctggtgattggcgttcacgcggcgctgctggcctttggagagtttatttttactcaatcgtacagactcctggtcgcccctgatgggcaaaacatctatgatacacgcaattgtggatcaatatagtcactgtgaatgggtggaaaatagcatgagtgccaatgaaaacaacctgatttggatcgatcttgagatgaccggtctggatcccgagcgcgatcgcattattgagattgccacgctggtgaccgatgccaacctgaatattctggcagaagggccgaccattgcagtacaccagtctgatgaacagctggcgctgatggatgactggaacgtgcgcacccataccgccagcgggctggtagagcgcgtgaaagcgagcacgatgggcgatcgggaagctgaactggcaacgctcgaatttttaaaacagtgggtgcctgcgggaaaaagcccgatttgcggtaacagcatcggtcaggaccgtcgtttcctgtttaaatacatgccggagctggaagcctacttccactaccgttatctcgatgtcagcaccctgaaagagctggcgcgccgctggaagccggaaattctggatggttttaccaagcaggggacgcatcaggcgatggatgatatccgtgaaagcgtggcggagctggcttactaccgcgagcattttatcaagctgtaaaatttttcctggtcacgtaagcgccggaatccacttgcggcggcgtgattttgacgctaaattgaacgtcttgctgataatttcagcacttgagataaaaacgcaaaaaaaacttttttggggggttgcagagggaaagatttctcgtataatgcgcctcccgtaacgacgcagaaatgcgaaaattacgaaagcaaaattaagtagtacgcgggaatagctcagttggtagagcacgaccttgccaaggtcggggtcgcgagttcgagtctcgtttcccgctccaaaatttgaaaagtgctgcaaagcacagaccacccaagcgggaatagctcagttggtagagcacgaccttgccaaggtcggggtcgcgagttcgagtctcgtttcccgctccaaaatttgaaagtgctgtaaggcacagaccacccaagcgggaatagctcagttggtagagcacgaccttgccaaggtcggggtcgcgagttcgagtctcgtttcccgctccaaattcttctctcaataaaatatccacagcgacgcgatgcgttattgctggtttttgttgtctctgacaaactcttgtaaacagagttatccacagcctcaggctgtaatcttaatttcaaagaaacttcgcacggtgaatagtatttttttaacctattgatagataagttaaaaattaagattccgttttgtcgagtcgatcacttgacgattttattcgtcttgaattgcaatgcgtttttatttttattcacaagctgtggatgaatcaggcgtcacgcggtaaccctttttcaatcacccgaaccagacgctgttttttcggcaattgcacttcgactatgcacgcatttcgtctctctatttgctgcgcaatcgcccacgctatgtgctcatcgagaagtgggtgctcacctttacgactttccagcgctgtcaaaatcgtttcatcccaaggggcattgcctaatgctacggcgatattacgcagccaacgcaggtgaccaatacgacgaatcgcgcttccttccgtgacttttaaaaacttctcttcgctccaggcgaataactcaatgagttccggtgcgtgtagcggcttacgcgggctgaaatcctcttctgtggtgagttgactatagcgattccacgggcagataagctggcagtcatcgcaaccgtaaatacggtttcccattaacggtcgcaactcttccgggatcgccccttcaagttcgatggtgagataagagatacagcggcgagcatcgacggtatatggctcgacgatggcaccggtcgggcaaatcgtcatacaggccacgcatttgccgcatccttcctcgactggttgatccacgggcagcggaatatcgaccagcaattcgcctaaaaagaagaagctaccggcctcgcgattgaggataagactgtgcttacctgtccagccgagcccagctttttcagctaacgggcgctcgagaataggcgcagaatcgacaaacggtctaaaattcaggctaacacaatgttgctgaatcatctcgcccagctttttgagtcggttgcgcagaagtttgtgatagtcacggcccagcgcataacggctaacatagccgagtttggggtttttcagcgtgctggcaaatgcggcgttagcaggaaggtaattcatccgcacgctgatcacgcgcagcgtaccgggcaataactcatgagggcgagcgcgcagcataccgtgacgtgccatccagtccatttcgccgtggtattgtttgtccagccatgcttgcagtttgggctcggactcgctgagatcggtatcggtaatacctacctgctgaaagcccagttccagcccccactgtttaattttttgcgctaactgattgagatcgaggggctcactcatgacggaccatacaatgaagaaaaaccccgtaagtataccacacaccgtctggtacgccgacgatatccgccgcggagaacgcgaggcggcagatgtgctggggctcacactctatgagctgatgcttcgcgctggcgaggccgcattccaggtgtgtcgtagcgcgtatcctgacgcccgccactggctggtgctgtgcggtcatggtaataacggcggcgatggctacgtggtcgcgcgactggccaaagcggtcggcattgaggtcacgttgttggcccaggagagcgacaaaccgttgccggaagaggccgcgctggcacgcgaagcatggttaaacgcgggtggcgagatccatgctagcaatattgtctggcccgaaagcgtagatctgattgttgatgcgctgctcggtaccggtttgcggcaagcgccccgcgaatccattagccagttaatcgaccacgctaattcccatcctgcgccgattgtggcggttgatatcccttccggcctgctggctgaaactggcgctacgccaggcgcggtgatcaacgccgatcacaccatcacttttattgcgctgaaaccaggcttgctcactggaaaagcgcgggatgttaccggacaactgcattttgacagtctggggctggatagttggctggcaggtcaggagacgaaaattcagcggtttagtgcagaacaactttctcactggctaaaaccgcgtcgcccgactagccataaaggcgatcacgggcggctggtaattatcggtggcgatcacggcacggcgggggctattcgtatgacgggggaagcggcgctgcgtgctggtgctggtttagtccgagtactgacccgcagtgaaaacattgcgccgctgctgactgcacgaccggaattgatggtgcatgaactgacgatggactctcttaccgaaagcctggaatgggccgatgtggtggtgattggtcccggtctgggccagcaagagtgggggaaaaaagcactgcaaaaagttgagaattttcgcaaaccgatgttgtgggatgccgatgcattgaacctgctggcaatcaatcccgataagcgtcacaatcgcgtgatcacgccgcatcctggcgaggccgcacggttgttaggctgttccgtcgctgaaattgaaagtgaccgcttacattacgccaaacgtctggtacaacgttatggcggcgtagcggtgctgaaaggtgccggaaccgtggtcgccgcccatcctgacgctttaggcattattgatgccggaaatgcaggcatggcgagcggcggcatgggcgatgtgctctctggtattattggcgcattgcttgggcaaaaactgagcccgtatgatgcagcctgtgcaggctgtgtcgcgcacggtgcggcagctgacgtactggcggcgcgttttggaacgcgcgggatgctggcaaccgatctcttttccacgctacagcgtattgttaacccggaagtgactgataaaaaccatgatgaaagcagtaattccgctccctgaataaggaagtgactgataaaaaccatgatgaatcgagtaattccgctccctgatgagcaggcaacattagacctgggcgagcgggtagcgaaagcctgcgatggcgcaaccgtaatctatctgtatggcgatttaggcgcaggtaaaaccacctttagccggggctttttacaggctctgggtcatcagggtaatgtcaaaagccccacttatacgctggtcgaaccctatacgctcgacaacttaatggtctatcactttgatttgtaccgccttgccgatcccgaggagctggagtttatggggatccgcgattattttgccaacgatgccatctgcctggtggagtggccacaacaaggtacaggtgttcttcctgacccggatgtcgaaatacacattgattatcaggcacaaggccgtgaggcgcgcgtgagtgcggtttcctctgcgggtgaattgttgctggcgcgtttagccggttaacctttgaaaggtggcgggatgatgtatcgcatcagaaattggttggtagcgacgctgctgctgctgtgcacgccggtgggtgccgcgacgctctctgatattcaggtttctaacggtaatcaacaggcgcggataacgttgagttttattggcgatcctgattatgcgtttagccatcaaagcaaacgcaccgtggcgctcgatatcaaacaaacgggcgtgattcagggactgccgttgttgttcagcggcaataatctggtgaaggcgattcgctctggaacgcctaaagatgcacaaacgctacggctggtggtcgatcttaccgaaaacggtaaaaccgaagcggtgaagcggcagaatggcagcaattacactgtcgtctttacgattaacgccgatgtgccgccaccgcctcctccgccgcccgtggttgcgaaacgcgttgaaacgcctgcggttgtcgcaccgcgcgtcagcgaaccggcgcgcaatccgtttaaaacggaaagtaaccgcactacgggtgttatcagcagtaatacggtaacgcgtccggcagcgcgcgcgacggctaacactggcgataaaattatcatcgctattgatgccggacacggcggtcaggaccctggcgctatcggccccggtggtacgcgggagaaaaatgtcaccatcgccatcgcgcgtaaattgcgtactttgctcaatgacgatccgatgtttaaaggcgttttaacccgtgacggggattactttatcagcgtgatggggcgcagtgatgtggcacgtaagcaaaacgccaatttcctcgtgagcattcacgctgatgccgcaccgaaccgcagtgcgactggcgcttccgtatgggtgctctctaaccgtcgcgccaacagtgaaatggccagctggctggagcagcacgagaaacagagcgagctgctgggtggggcgggtgatgtgctggcgaacagtcagtctgacccctatttaagccaggcggtgctggatttacagttcggtcattcccagcgggtagggtatgatgtagcgaccagtatgatcagtcagttgcaacgcattggcgaaatacataaacgtcgaccagaacacgccagccttggcgttctgcgcagcccggatatcccaagtgtactggtcgaaaccggttttatcagcaacaacagcgaagaacgtttgctggcgagcgacgattaccaacaacagctggcagaagccatttacaaaggcctgcgcaattacttccttgcgcatccgatgcaatctgcgccgcagggtgcaacggcacaaactgccagtacggtgacgacgccagatcgcacgctgccaaactaaggacgattgatgccaattcaggtcttaccgccacaactggcgaaccagattgccgcaggtgaggtggtcgagcgacctgcgagcgtagtcaaagaactagtggaaaacagcctcgatgcaggtgcgacgcgtatcgatattgatatcgaacgcggtggggcgaaacttatccgcattcgtgataacggctgcggtatcaaaaaagatgagctggcgctggcgctggctcgtcatgccaccagtaaaatcgcctctctggacgatctcgaagccattatcagcctgggctttcgcggtgaggcgctggcgagtatcagtagcgtttcccgcctgacgctcactagtcgcaccgcagaacagcaggaagcctggcaggcctatgccgaagggcgcgatatgaacgtgacggtaaaaccggcggcgcatcctgtggggacgacgctggaggtgctggatctgttctacaacaccccggcgcggcgcaaattcctgcgcaccgagaaaaccgaatttaaccacattgatgagatcatccgccgcattgcgctggcgcgtttcgacgtcacgatcaacctgagccataacggtaaaattgtgcgtcagtaccgcgcagtgccggaaggcgggcaaaaagaacggcgcttaggcgcgatttgcggcaccgcttttcttgaacaagcgctggcgattgaatggcaacacggcgatctcacgctacgcggctgggtggccgatccaaatcacaccacgcccgcactggcagaaattcagtattgctacgtgaacggtcgcatgatgcgcgatcgcctgatcaatcacgcgatccgccaggcctgcgaagacaaactgggggccgatcagcaaccggcatttgtgttgtatctggagatcgacccacatcaggtggacgtcaacgtgcaccccgccaaacacgaagtgcgtttccatcagagccgtctggtgcatgattttatctatcagggcgtgctgagcgtgctacaacagcaactggaaacgccgctaccgctggacgatgaaccccaacctgcaccgcgttccattccggaaaaccgcgtggcggcggggcgcaatcactttgcagaaccggcagctcgtgagccggtagctccgcgctacactcctgcgccagcaagtggcagtcgtccggctgccccctggccgaatgcgcagccaggctaccagaaacagcaaggtgaagtgtatcgccagcttttgcaaacgcccgcgccgatgcaaaaattaaaagcgccggaaccgcaggaacctgcacttgcggcgaacagtcagagttttggtcgggtactgactatcgtccattccgactgtgcgttgctggagcgcgacggcaacattagtcttttatccttgccagtggcagaacgttggctgcgtcaggcacaattgacgccgggtgaagcgcccgtttgcgcccagccgctgctgattccgttgcggctaaaagtttctgccgaagaaaaaagcgcattagaaaaagcgcagtctgccctggcggaattgggtattgatttccagagtgatgcacagcatgtgaccatcagggcagtgcctttacccttacgccaacaaaatttacaaatcttgattcctgaactgataggctacctggcgaagcagtccgtattcgaacctggcaatattgcgcagtggattgcacgaaatctgatgagcgaacatgcgcagtggagtatggcacaggccataaccctgctggcggacgtggaacggttatgtccgcaacttgtgaaaacgccgccgggtggtctgttacaatctgttgatttacatccggcgataaaagccctgaaagatgagtgatatcagtaaggcgagcctgcctaaggcgatttttttgatggggccgacggcctccggtaaaacggcgttagccattgagctgcgtaaaattttaccagtagagttgataagcgttgattctgcccttatttacaaagggatggatatcgggacggcgaagccgaacgctgaagagttactcgccgcgccgcaccgattgctggatattcgcgatccgagccaggcttacagcgctgctgattttcgccgcgatgcgctggcggaaatggccgatatcaccgcggcggggcggatcccactgttagtgggcggtacgatgttgtatttcaaggcattgctggaagggttgagcccgctaccgagcgcagacccggaagtacgggccagaattgagcaacaggcggcagagcaaggttgggagagtttgcatcgtcaacttcaggaggtagatccggttgcggcagcaaggattcatccaaatgatccacaaaggctttcccgggcactggaagtttttttcattagcggtaaaactttaacggaactgacgcaaacgagtggagacgctctaccgtatcaggtgcatcagttcgccatcgccccggcgagccgtgaactgctccatcaacgcattgagcagcgttttcatcagatgttggctagtggttttgaagcagaagtccgggcgctttttgcccgaggagatttgcatacggacttgccttccattcgttgcgtgggttatcgccagatgtggtcttaccttgaaggcgaaatcagttacgatgaaatggtttatcgaggtgtttgcgccacgagacagttggcgaagcggcagataacctggctgcgtggttgggaaggggttcactggcttgacagtgaaaaaccagaacaggcgcgtgacgaagtattacaggttgttggtgctatcgcaggctgaatgtgtacaattgagacgtatcgtgcgcaattttttcagaatcgaaaggttcaaagtacaaataagcatataaggaaaagagagaatggctaaggggcaatctttacaagatccgttcctgaacgcactgcgtcgggaacgtgttccagtttctatttatttggtgaatggtattaagctgcaagggcaaatcgagtcttttgatcagttcgtgatcctgttgaaaaacacggtcagccagatggtttacaagcacgcgatttctactgttgtcccgtctcgcccggtttctcatcacagtaacaacgccggtggcggtaccagcagtaactaccatcatggtagcagcgcgcagaatacttccgcgcaacaggacagcgaagaaaccgaataaggtttcgggctgtttttttacacggggagccagcgatcctgcgttccccgctgatctatttagagggttatacgcttgtttgaccgttatgatgctggtgagcaggcggtactggtacacatctattttacgcaagacaaagatatggaagacctccaggagtttgaatctctggtctcttccgccggtgtcgaagcattgcaggtgattaccggtagccgtaaagcgccgcacccaaagtattttgtaggtgaaggtaaagcagttgaaattgcggaagctgtcaaagcgacgggtgctagcgtcgttctttttgaccatgccctgagcccggcgcaagagcgtaacctggagcgtttgtgcgagtgtcgtgttatcgaccgcaccggccttattttagatattttcgcccaacgtgcgcgtacccatgagggtaagttgcaggttgagctggcgcagctgcgccatctggctacgcgcctggtgcgtggctggacccaccttgaaagacagaaaggcgggataggtttgcgtggtccgggtgaaacccagctcgaaaccgaccgtcgtttgttgcgtaatcgcatcgtgcagatacagagccgcctggaaagagttgaaaagcagcgtgagcaggggcggcaaagccgtatcaaagccgacgttcctactgttagcctggtgggatataccaacgccggtaaatctacccttttcaatcgcatcaccgaagcgcgggtctacgcggcagaccagttgtttgccaccctcgacccgacgttgcggcgtattgacgttgcagatgtcggtgaaaccgtacttgcagataccgtagggtttattcgccacctgccgcacgatctggtggcggcatttaaagccacgttacaagagacgcggcaagccacattactgctgcacgtcattgatgcggcggatgtgcgtgtacaagaaaacatcgaagcggtgaatacggttcttgaagagatcgacgctcacgagatcccaaccctgctggtgatgaacaagatcgatatgctggaagatttcgaaccgcgtattgatcgggacgaagagaacaaaccgaaccgtgtctggctttccgcacagaccggagcggggataccacagctttttcaggctttgacggagcggctttccggcgaggtggcgcagcatacattgcgtctgccaccgcaggaagggcgtctgagaagtcgtttttatcagcttcaggcaatagaaaaagagtggatggaggaggacggcagcgtaagtctgcaagttcgtatgccgatcgttgactggcgtcgcctctgtaaacaagaaccggcgttgatcgattacctgatctaacggcgtagcgtctgaagcgtggagtcatatcctctggcgtcgaaagacaacagggatcaccgcataacaaatatggagcacaaacatggcgtggaatcagcccggtaataacggacaagaccgcgacccgtggggaagcagcaaacctggcggcaactctgagggaaatggaaacaaaggcggtcgcgatcaagggccacctgatttagatgatatcttccgcaaactgagcaaaaagctcggtggtctgggcggcggtaaaggcaccggatctggcggtggcagtagtagccaaggcccgcgcccgcagcttggcggtcgtgtcgttaccatcgcagcggcagcgattgtcattatctgggcggccagtggtttctataccattaaagaagccgaacgcggcgtggtaacacgctttggtaaattcagccatctggttgagccgggtctgaactggaaaccgacgtttatcgacgaagtcaaaccggtgaacgtggaagccgtgcgtgaactggccgcttctggtgtgatgctgacgagcgacgagaacgtagtgcgcgttgagatgaacgtgcagtaccgcgtcaccaatccggaaaaatatctgtatagcgtgaccagcccggatgacagcctgcgtcaggctaccgacagcgccctgcgtggagttatcggtaaatacaccatggaccgcattctgacggaaggtcgtaccgtgattcgtagcgatactcagcgcgaactggaagagacgattcgtccgtatgacatgggtatcacgctgctggacgtcaacttccaggctgctcgtccgccggaagaagtaaaagcggcgtttgacgatgcgattgccgcgcgtgaaaacgaacagcaatacattcgtgaagcagaagcgtataccaacgaagttcagccgcgtgcgaacggtcaggcgcaacgtatcctcgaagaggcgcgtgcgtacaaggcccagaccatcctggaagctcagggtgaagtggcgcgctttgctaaacttctgccggaatataaagccgcgccggaaattactcgcgagcgtctgtatatcgagacgatggaaaaagtgttgggtaacacccgcaaagtgctggttaacgataaaggtggcaacctgatggttctgccgttagaccagatgctgaaaggtggtaacgcccctgcggcgaagagcgataacggtgccagcaatctgctgcgtctgccgccagcctcttcctccacaaccagtggagcaagcaacacgagctccaccagtcagggcgatattatggaccaacgccgcgccaacgcgcagcgtaacgactaccagcgtcagggggaataacgatgcgtaagagtgttatcgcgattatcatcatcgtgctggtagtgctttacatgtctgtctttgtcgtcaaagaaggtgagcgcggtattacgctgcgttttggtaaggtactgcgtgacgatgacaacaaacctctggtttatgagccgggtctgcatttcaagataccgttcattgaaacggtgaaaatgctcgacgcacgtattcagaccatggacaaccaggccgaccgctttgtgaccaaagagaagaaagacctgatcgtcgactcttacatcaaatggcgcatcagcgatttcagccgttactacctggcaacgggtggtggcgacattagccaagcggaagtgctgttgaaacgtaagttctctgaccgtctgcgttctgaaattggtcgcctggacgtgaaagatatcgtcaccgattcccgtggtcgtctgaccctcgaagtacgtgacgcgctgaactccggttctgcgggtacagaagatgaagttactaccccggcggcagataacgccattgccgaagcggcagagcgcgtaacggctgagacgaagggcaaagttccggtcatcaacccgaacagtatggcggcgctgggtattgaagttgtcgatgtgcgtatcaagcagatcaacctgccgaccgaagtgtctgaagcgatctacaaccgtatgcgcgccgagcgtgaagcggtagcgcgtcgtcaccgtagtcaaggtcaggaagaagcggaaaaactgcgcgcgactgccgactatgaagtgaccagaacgctggcagaagctgagcgtcagggccgcatcatgcgtggtgaaggcgatgccgaagcagccaaactgtttgctgatgcattcagtaaagatccggacttctacgcattcatccgtagcctgcgtgcttatgagaacagcttctctggcaatcaggacgtgatggtcatgagcccggatagcgatttcttccgctacatgaagacgccgacttccgcaacgcgttaatataacgactgcggtacaggtcaataaagccaccgcatcctcagggatgtcggtggttttctttttctataaggataatgaatgaatagcacaatctggctggcgcttgccctggttttggtactggaaggtttagggccgatgctttacccgaaggcatggaagaagatgatctctgcgatgaccaatttgcccgataatattttacgtcgttttggcggtggacttgtggttgcgggcgttgtggtctactacatgttgaggaaaacgattggctgaacaaaaaacagactgatcgaggtcatttttgagtgcaaaaagtgctgtaactctgaaaaagcgatggtagaatccatttttaagcaaacggtgattttgaaaaatgggtaacaacgtcgtcgtactgggcacccaatggggtgacgaaggtaaaggtaagatcgtcgatcttctgactgaacgggctaaatatgttgtacgctaccagggcggtcacaacgcaggccatactctcgtaatcaacggtgaaaaaaccgttctccatcttattccaagtggtattctccgcgagaatgtaaccagcatcatcggtaacggtgttgtgctgtctccggccgcgctgatgaaagagatgaaagaactggaagaccgtggcatccccgttcgtgagcgtctgctgctgtctgaagcatgtccgctgatccttgattatcacgttgcgctggataacgcgcgtgagaaagcgcgtggcgcgaaagcgatcggcaccaccggtcgtggtatcgggcctgcttatgaagataaagtagcacgtcgcggtctgcgtgttggcgaccttttcgacaaagaaaccttcgctgaaaaactgaaagaagtgatggaatatcacaacttccagttggttaactactacaaagctgaagcggttgattaccagaaagttctggatgatacgatggctgttgccgacatcctgacttctatggtggttgacgtttctgacctgctcgaccaggcgcgtcagcgtggcgatttcgtcatgtttgaaggtgcgcagggtacgctgctggatatcgaccacggtacttatccgtacgtaacttcttccaacaccactgctggtggcgtggcgaccggttccggcctgggcccgcgttatgttgattacgttctgggtatcctcaaagcttactccactcgtgtaggtgcaggtccgttcccgaccgaactgtttgatgaaactggcgagttcctctgcaagcagggtaacgaattcggcgcaactacggggcgtcgtcgtcgtaccggctggctggacaccgttgccgttcgtcgtgcggtacagctgaactccctgtctggcttctgcctgactaaactggacgttctggatggcctgaaagaggttaaactctgcgtggcttaccgtatgccggatggtcgcgaagtgactaccactccgctggcagctgacgactggaaaggtgtagagccgatttacgaaaccatgccgggctggtctgaatccaccttcggcgtgaaagatcgtagcggcctgccgcaggcggcgctgaactatatcaagcgtattgaagagctgactggtgtgccgatcgatatcatctctaccggtccggatcgtactgaaaccatgattctgcgcgacccgttcgacgcgtaattctggtacgcctggcagatattttgcctgccgggcgaacagtgtgatacattgctgtgtcgggtaagccattacgctatccgacacagtgttaaatcctcgcttttttccttccccgaactgaaataaattagcgacacagcttgtggctggtttatcatcaatataaatgtattttttcccgatttcccttttgaggttgatgtgcagttaacgagtttcactgattacggattacgtgcgctgatctacatggcgagtttgccagaagggcggatgaccagtatttctgaagtgactgacgtctacggcgtctcccgtaatcatatggtcaaaataatcaatcaacttagtcgtgccggctacgtgactgctgttcgtggaaaaaatggcggcattcgcctgggtaaaccggcgagtgcgatacgtattggtgatgtggtgcgcgagctggagcccttaagcctggtgaattgcagcagtgagttttgccacattacacctgcctgtaggttgaaacaggcactttctaaggccgtgcaaagttttcttacggaactggataactacacgcttgccgatttggttgaagagaatcaaccgctttataaattattgctggtggagtgacgaaaatcttcatcagagatgacaacggaggaaccgagatgagtcaagatcctttccaggaacgcgaagctgaaaaatacgcgaatcccatccctagtcgggaatttatcctcgaacatttaaccaaacgtgaaaaaccggccagccgtgatgagctggcggtagaactgcacattgaaggcgaagagcagcttgaaggcctgcgtcgccgcctgcgcgcgatggagcgcgatggtcaactggtcttcactcgtcgtcagtgctatgcgctgccggaacgcctcgacctggtgaaaggtaccgttattggccaccgtgatggctacggctttctgcgggttgaagggcgtaaagatgatttgtatctctccagcgagcagatgaaaacctgcattcatggcgatcaggtgctggctcagccgctgggtgctgaccgtaaaggtcgtcgtgaagcgcgtattgtccgcgtactggtgccaaaaaccagccagattgttggtcgctactttaccgaagcgggcgtcggctttgtggttcctgacgacagccgtctgagcttcgatatcttaatcccgcccgatcagatcatgggcgcgcggatgggctttgtggtcgtagtcgaactgactcagcgtccgactcgccgcaccaaagcggtgggtaaaatcgtcgaagtgctgggcgacaatatgggcaccggcatggcggttgatatcgctctgcgtacccatgaaattccgtacatctggccgcaggctgttgagcaacaggttgccgggctgaaagaagaagtgccggaagaagcaaaagcgggccgtgttgatctgcgcgatttaccgctggtcaccattgatggcgaagacgcccgtgactttgacgatgcagtttactgcgagaaaaaacgcggcggcggctggcgtttatgggtcgcgattgccgacgtcagctactatgtgcgtccgagtacgccgctggacagagaagcgcgtaaccgtggcacgagcgtgtacttccctagccaggttatcccgatgctgccggaagtgctctctaacggcctgtgtagcctcaacccgcaggtagaccgcctgtgtatggtgtgcgagatgacggttagcagcaaaggccgcctgacgggctacaaattctacgaagcggtgatgagctctcacgcgcgtctgacctacaccaaagtctggcatattctgcagggcgatcaggatctgcgcgagcagtacgccccgctggttaagcatctcgaagagttgcataacctctataaagtgctggataaagcccgtgaagaacgcggtgggatcagttttgagagcgaagaagcgaagttcattttcaacgctgaacgccgtattgaacgtatcgaacagacccagcgtaacgacgcgcacaaattaattgaagagtgcatgattctggcgaatatcagcgcggcgcgtttcgttgagaaagcgaaagaaccggcactgttccgtattcacgacaagccgagcaccgaagcgattacctctttccgtagtgtgctggcggagctggggctggaactgccgggcggtaacaagccggaaccgcgtgactacgcggagctgctggagagcgttgccgatcgtcctgatgcagaaatgctgcaaaccatgctgctgcgcagcatgaaacaggcgatttacgatccagaaaaccgtggtcactttggcctggcattgcagtcctatgcgcactttactagcccgattcgtcgttatccagacctgacgctgcaccgcgccattaaatatctgctggcgaaagagcaggggcatcagggcaacaccactgaaaccggcggctaccattatagcatggaagagatgctgcaactgggtcagcactgtagcatggcggaacgtcgtgccgacgaagcaacgcgcgatgtggctgactggctgaagtgtgacttcatgctcgaccaggtaggtaacgtctttaaaggcgtaatttccagcgtcactggctttggcttcttcgtccgtctggacgacttgttcattgatggtctggtccatgtctctagcctggacaatgactactatcgctttgaccaggtagggcaacgcctgatgggggaatccagcggccagacttatcgcctgggcgatcgcgtggaagttcgcgtcgaagcggttaatatggacgagcgcaaaatcgactttagcctgatctccagcgaacgcgcaccgcgcaacgtcggtaaaacggcgcgcgagaaagcgaaaaaaggcgatgcaggtaaaaaaggcggcaagcgtcgtcaggtcggtaaaaaggtaaactttgagccagacagcgccttccgcggtgagaaaaaaacgaagccgaaagcggcgaagaaagacgcgagaaaagcgaaaaagccaagcgcgaaaacgcagaaaatagctgcagcgaccaaagcgaagcgtgcggcgaagaaaaaagtggcagagtgatcaataccctctttaaaagaagagggttagattgctgacaaaatgcgctttgttcatgccggatgcggcgtgaacgccttatccggcctacataatcacgcaaattcaatatattgcagagatcatgtaggccggataaacgtagtgcatcaggcaaaacgtaaacaacgagtacattaatgagcgaaatgatttacggcatccacgcagtgcaggccctgctggagcgcgcccctgaacgttttcaggaagtctttattttaaaaggccgtgaagataaacgtctgttaccgctgattcacgcccttgagtctcagggcgtggttatccagttggcaaaccgccaatatctcgacgagaaaagcgacggtgccgtgcatcagggcattatcgcccgcgtgaagccaggacgtcagtatcaggaaaacgatctgccggatctgatcgctagcctcgatcaaccgttcctgctgatcctcgacggcgtaaccgatccgcacaacctcggcgcgtgcctgcgtagtgcggacgccgcaggcgttcatgcggtgattgtgccgaaagatcgctccgcacagctcaacgctacggcgaaaaaagtagcctgcggcgcggcagaaagcgttccgctgattcgggtgactaaccttgcgcgcaccatgcgtatgttgcaggaagagaatatctggatcgtcggtacggcaggcgaggcggatcatacactctatcagagcaaaatgaccggacgcctggcgctggtgatgggtgcggaaggtgaaggtatgcgtcgcctgactcgtgaacattgcgatgagttgatcagcatcccgatggctggaagcgtttcttccctgaacgttagcgttgcgaccggaatttgcttatttgaagcggtgcgccagcgcagctaatttctcagaattatgaaaagccatccagatttggatggtttttttttgtctatagctggtaagataattacgtattgcaaatattcattttattaatatttaaacttaatctatatggaataatatatgacatggaatccgttggcgctagcgacggcgctgcaaactgtacctgaacaaaatattgatgtaacaaatagcgagaacgcattaattattaaaatgaatgattatggcgatttgcaaatcaatattctttttacttcccgccaaatgattatcgaaacctttatttgtccggtgagtagtatcagcaatccagatgaatttaataccttcttattaagaaatcagaagatgatgccgttgagtagcgtagggatctccagcgtacaacaggaagagtattacattgttttcggggcgttaagccttaaatcttctcttgaagatatcctgcttgagataaccagcctggtagataacgcattggatctggctgaaattacagaagaatatagtcactaattacaaggacgggtatttatgggaattttaaaaagtttatttacgctggggaaaagctttatctcccaggcggaagaatccattgaagaaacccagggcgtgcgcatgctggaacagcatattcgtgacgctaaagctgaactcgataaagccggaaaatctcgcgttgatctgctggcgcgggtgaaattaagtcacgataagctgaaagatttacgtgagcgcaaagccagtctggaagcccgtgcgctggaagcgttaagcaagaacgttaatccgagcttgattaacgaagttgctgaagaaatcgcgcgccttgagaatctcattaccgctgaagagcaagtgttgagcaatctggaagtctcccgtgatggcgtggaaaaagcagttacagcgacagcgcagcgtatcgctcagtttgagcagcaaatggaagtcgttaaagccactgaagccatgcagcgtgcacaacaggctgtaacaacctctaccgttggcgcatcttccagcgttagcacagcggcagaatccttaaaacgcctgcaaacgcgtcaggccgaacgtcaggctcgcctggatgctgccgcacagttggagaaagtcgcagacggtcgcgaccttgacgaaaagctggcggaagccggaattggcggtagcaataaaagtagcgcccaggatgtattagcaagactgcaacgccaacagggcgagtaatttttttgccagcctcgctaaaaggctggcaactattttaaggataaaatatgtctggttttttccagcgtctgtttggcaaggataataagccagctatcgctcgtggtccgctgggacttcatctcaatagtggctttacgctcgacacgttagcgtttcgtttgctggaagatgaattgctgattgcgctgccgggtgaggaatttacggtagccgccgtcagccacatcgatctgggcggcggtagtcagattttccgctactacactagtggcgatgagtttctgcaaatcaataccaccggcggcgaagatattgatgacattgatgatatcaagctctttgtctatgaagagagctacggtatcagtaaagagagtcactggcgcgaggcgatcaacgccaaagcgatgggagcaatgaccttaaactggcaggaaaaacgctggcagcgattttttaacagcgaagaaccgggaaatatcgaacccgtctacatgctggaaaaagtagaaaatcaaaaccatgccaaatgggaggtccataattttaccatgggctaccaacggcaagtaaccgaagatacttacgaatatttgctgctaaatggtgaggaatcttttaacgatctcggcgagccagagtggttatttagccgcgcgttgggtgtcgatatcccgctgacaagtcttcatattattggttaattacaaggacgtttacaatgcatatactggatagtcttcttgcctttagcgcctatttttttattggcgtggctatggtgattatttttctgtttatctattctaaaattacaccgcacaacgaatggcagttaatcaaaaacaataataccgcggcgagtctggcgttcagcggtacattgttgggttacgttatccccttatccagtgcggcaatcaatgcggtgagtattccagactatttcgcctggggcgggattgcactggtgattcagttactcgtttttgctggtgtcagactttatatgcccgcattaagcgaaaaaattattaatcacaataccgcagcaggaatgtttatgggaaccgccgcgctggctggcggtatttttaacgcagcttgtatgacatggtaatggacgatcatggccagaaaacgcaaaagtagaaataacagtaaaattggtcacggagcgattagtcgcattggtagaccgaataatccttttgaaccgtgccgcaatcgctacgcacaaaaatacttaacgttggcgctaatgggcggtgccgcttttttcgtattgaaaggttgtagcgatagtagcgatgtcgataacgacggcgacggaacgttttacgcgacagtgcaggattgtattgatgacggtaataatgccgacatttgcgcgcgtggctggaacaacgccaaaacggcattttatgccgatgttccgaagaatatgactcagcagaactgtcagtctaagtacgaaaattgctactacgacaatgttgaacagagttggatcccggtcgtttctggatttttgttaagccgggttattcgtaaagatcgcgatgagccgtttgtttataacagcggcggttcctcttttgctagccgcccagtctggcgcagcacttctggtgattactcctggcgctccggttctggcaaaaaagagtcttactctagcggcggctttaccaccaaaaaagcgtctaccgtttctcgcggcggctatggtcgttcttccagcgcccgtgggcattggggaggctaatcatgctgagacacaacgttcctgtgcgacgggatctggaccagatcgccgctgacaacggtttcgactttcatatcatcgacaatgaaatctattgggatgagagtcgggcttaccgttttactctgcgccagattgaagagcagatcgaaaaaccgactgcggaactgcatcagatgtgccttgaggtggtggatcgcgcggtaaaagatgaagagatcctgacgcaactggcgatcccgccgttgtactgggatgtgatcgctgaaagctggcgcgcccgcgatcctagcctgtatggacggatggattttgcctggtgtggcaatgcgccggtgaagctgctggagtacaacgccgatacgccaactagtttgtacgagagcgcttattcccagtggctgtggctggaggatgcccggcgcagcggcattattccgcgtgatgccgatcagtacaatgctattcaggaacgcctgattagtcgctttagcgagctttacagtcgggaaccgttttatttttgctgctgtcaggacaccgatgaagacaggagtaccgtgctgtacttgcaggactgcgcccagcaggcagggcaggagagccggtttatctacattgaagatctcggtttgggcgtcggcggcgtactgaccgatcttgatgataatgtcatccagcgtgcatttaagctgtatccgctggagtggatgatgcgtgacgataacggtccgctgctgcgcaagcgtcgcgagcaatgggtggagccgttatggaaaagtatcttgagtaataaagggctaatgccgctgctttggcgcttcttccctggtcatcctaatcttcttgcgtcctggttcgatggcgagaaaccgcagattgccgctggcgaaagctatgtgcgtaaaccaatctatagccgcgaaggcggcaacgtcaccatttttgacggcaagaataacgttgttgaccacgctgatggtgattacgccgatgaaccgatgatctaccaggcgtttcaacctctgccgcggtttggcgatagctacacactcatcggtagctggattgtcgatgatgaagcgtgcggaatggggatccgtgaagataacacactgatcaccaaagacaccagtcgtttcgttccgcattacattgctggataagaatgttttagcaatctctttctgtcatgaatccatggcagtgaccatactaatggtgactgccattgatggagggagacacagtgcactggcaaactcacaccgtttttaatcaacctataccattaaataacagcaacttatacctgtctgatggcgcgctctgcgaagcggtaacgcgtgaaggtgctggctgggatagcgattttctagccagtattggtcagcagttaggaacggctgaatcccttgaactggggcggctggcgaatgtgaatccgcctgaattattgcgctacgatgcgcaaggacgccgtctggacgatgtgcgttttcaccccgcctggcacctgctgatgcaggcgctatgtaccaatcgggtgcacaatcttgcctgggaagaagacgctcgctccggcgcatttgtggcgcgcgcggcgcgttttatgttacatgcgcaggttgaggcagggagcttatgtccgataaccatgacctttgccgccacgccattgttgttacagatgttacccgcgccgtttcaggactggaccacgccgctattgagcgatcgctacgattctcacttattgccaggtgggcaaaaacgcggtttgttgattggcatgggaatgacggaaaagcagggcggttccgatgttatgagcaacaccacccgtgcagagcgtctggaagatggctcttatcggctggtggggcataaatggtttttcagcgttccgcaaagcgatgcgcatctggtgctggcgcagaccgcgggtggtctgtcctgcttttttgtgccgcgctttttgcctgacgggcaacgcaacgcgattcgcctcgagcggctgaaagataagctgggtaatcgctctaacgccagttgcgaagtggagtttcaggatgccattggttggttgttggggctggaaggggaaggaattcgtctgatcctgaaaatgggtgggatgacgcgttttgattgcgccctgggtagccatgccatgatgcgccgtgcatttagcctggcgatttatcatgcacatcaacgccatgtttttggtaatccattgatccaacagccccttatgcgtcatgtcttaagtcgcatggcacttcagcttgaagggcaaacggcgttgctgtttcgtcttgcgcgagcgtgggaccggcgtgccgatgccaaagaagccctgtgggcgcgtttatttacgcctgcggcaaaatttgtgatctgcaaaagaggtatgccgtttgtggccgaagcgatggaggtgctgggcggcattggttattgcgaggagagtgagctgccgcggctttaccgggagatgccggtaaacagtatttgggaaggttccggcaatattatgtgcctggatgtgttgcgcgttctcaataagcaagcgggcgtatacgacttattgagcgaagcatttgtggaagtgaaagggcaggatcgctattttgatcgcgcggttcgtcgtttacagcagcagctgcgtaagccagctgaagaactggggcgagagattactcatcagctattcctgctgggctgcggtgcgcaaatgttgaaatatgcttctccgccaatggcgcaggcgtggtgtcaggtgatgttagatacgcgcggcggcgtacggttgagtgagcagatccagaatgatttattgctgcgggcgacggggggagtgtgtgtgtaagcgtatacgactgatgcgacgctggtttcgattaactaaatgaaatatgtgaaaattgtaggccggacaaggcgctcgcgccgcatccggcattgttcatttgctgtagatgacactcatgcatacagtatcgcctgtacgcgccagttatcaggctgctggtcttcgtacatggtaataatgcggtaccaactcgcaccttgttcatcggcctttaacgccacgatacgttccacgtcctgcggatccccactaatattgctaacactgatctgacctatttcattcaggcccgtcacgcagtcagcactggcgaattctgcagactgtgccgtggcgctcgcaggataagtcactaattgcaggctgggactggcaagtaattgtttcatcgtcagctccatttttcgtttccccacatgttgcagggcattccatcgcggtaataaacgcccaggcttccagccggtaatttattgtgcacaggtaaacgcatagggacgcaaagcaatgtaaagctgactatgtaagttgtctgatttatttacggtacaaaatggcttgactataccactgtcctgtcacgatggtttcgtccaccatgacgacaacgtaataatcagcttttgcagcgacagctttcgctttgatttctgctaatgcgtcatccggagaaccccgaaccatcgtgcttacgctacctattcgctgtaacccttgcgtctggtcgcggcgaatctcttgcggatggtccgttactggcggtgctggctgtggcgtaccttgcagtgcgctacaggcacttaacatcaacaccaataataaactggcaaaccggtaaataacgctattacgtttcctgctaaccatagtgtagtgccttattaatttaactttgggggaatgttcccgaattgttacctggtacgcgattttcgaatgaaaacgtgacgaaagcgtaacccacatctcaacattatgaactaataccgccagcagaaacttgtgctaaggatttcttcatgtcataccagacaaaaaggagagacagatgattgaaatagaaagtcgcgagctggcagatattcccgttcttcatgcttatcctgtcgggcaaaaagataccccgttaccgtgcgtaattttttatcacggctttactagttccagtctggtgtatagctattttgccgttgcgctggcgcaggctggtttgcgggtgatcatgccggatgcgcccgatcacggtagccgttttagtggtgacgcagcgcggcggttaaatcaattctggcaaatcttgctacaaagtatgcaggaattcactactttacgtgcggcaatagccgaagaaaactggctgcttgatgaccgtctggcagtcggtggcgcgagcatgggcgcgatgacggcactggggattaccgctcgccaccccacggtgagatgtaccgccagcatgatgggaagcggctattttacaagtctcgcccgtagtctgtttccaccgctgatacctgaaacggcagcacagcagaatgaattcaataacattgtcgcgccactggcagagtgggaagcgacaaaccacctggaacaacttagtgacagacctctactgctgtggcatggcctcgacgatgacgttgtgcctgccgacgaaagtctacgtttgcagcaggccttaagcgagacgggacgggataaactgctaacctgtagttggcagccaggcgtgcgtcaccgcattacgcctgaggcgttagatgctgccgtgacatttttccgccagcatctttaaacacgcagaatgctgaccccttgcgcttccagttgttgcaggatttccgggttagcatttttgccggtgataagcatatcgatttgatcggcacggctaaaaagcattcccgcgcgttcgccaatcttactgctatcaaccagtaccaccagtttccctaccacgctcagcatcttctgctctgccattgctgtcagcatatcggttttatacaacccttctgcggtcagcccttttccgctggtaaacatccagtgcccggcatagagactgttttcgctgccctgcgggcttaaagtgatggactgacttttgttgtactgtccgcccataatgatcacgctgtcatgttcttgatcgatcaggtaatttgccagcggtagataattagtgatgatttgcactggcttgccacacatttcccgcccaagcagaaacgcggtggagccgcagttgatgactacgctttcgcccggattaaccagctggctggccgctttagcgatacgtactttttcatcgtgattctgcgcctgatgcagattcatcggcgtccagcgcgggcgctgttgggtaatagcttctgcgccattgcgcacttttttcagtttgccgctttcgtcaagtttattgatatcgcgtcgcgcagtggcagggctaattcccagacgctcaacgactttctcaacggtcacaaagcccaattgtgcgagcatttccaggaggatttgatgtctttgtgcttcagtcatgagctattccgataaaatttgatttttttagatgatatttgaaatagccaggaaatactacgccggatagcgcgaacttctccacgctacccggtataaacgacagattacaggaaactcttgaacggcagatccggttcaatagtgaagcaatcatcgaaaccgcgcggatagtggtactcgaagttgtctttatccagcggccaggtaaatttgccacccacctgccagataaacggcttgaagccatacttcaggcgatcttttttcatctcccacagcacgcggatctcttgcggatcggcctggaagttactccagatatcgtggtggaacgggatcactactttcgcattcagcgcttcacccatacgcagcatatcggcgctggtcattttgtcggtgataccgcgcgggttttcgccgtagcttcctaacgccacgtcgatctgatgttcgttaccgtgcttcgcataatagttagagtagtgggagtcgccgctgtgatacagggagccgccaggcgttttgaacaggtagttcaccgcgcgatcgtccatgccatctggcagtacgccagccgctttttgatcggcaggcagggtgatcagtgcagtacggtcgaaagcatcaagcgcatgaatttcaatgtctttcacttttactacatcgcccggtttgaccacgatgcaacgctctttcggtacgccccagccaatccacaaatccacacaggttttcggtccgataaacggtacgtcatctgcacaattctgcatcacggcagcagcgacgttaacgtcgatatgatcgttgtgatcgtgagtcgccagtaccgcgtcgatctggcgaatcgcaaacggatcaagaacaaacggggtggtacgcaggtttggctgcagttttttcacgccagccatgcgctgcatctggtgaccctgtttcattaacgggttaccgtgactttgtttgccagtgccgcaccagaaatcaacgcaaacgttggtgccaccttcgcttttcaaccagatcccggtgcagccaagccaccacatcgcaaatgtgccaggagcgacctgttcttgttcaatttcttcattcaaccagctaccccactccgggaaagtgctcaggatccaggattcacgggtgatacttttcactttactcatcgccatttaccttcatgatagttcaattcgaatcaatatgtgattggttttgattaatcctgacactattttttcaggaaggcaatgaccattttttgactttttgccagggaagttgttgttgattttgagtatggaaagatttaatggaatgtgtaattcaattaactaaatgaatttaaatggataattgtttcgttgtgtgaatcccactctatccatgtggaattatttgcgggtcgcgtcacatttaatcataaataatcttgttgtgattacttttgaaaattagagtgagtgcacaacattccgggtgtgtggaatacccggttacctcttcttcaggagatcgttatggagatcctctacaacatctttaccgtgttttttaaccaggtcatgaccaatgccccgttgttgctgggtattgtgacctgtctgggctacatcctactgcgcaaaagtgtcagcgttattattaaaggcacgattaaaaccataattggtttcatgttgttgcaggcagggtccggcatcctcaccagcaccttcaaaccggtggtggcgaaaatgtccgaagtctacggcattaacggcgcaatttccgatacctacgctagtatgatggcaaccatcgaccgcatgggcgatgcctatagctgggtgggttacgccgtattgttagcgctggcgctgaacatctgttacgtgctgttgcgtcgcattaccggcattcgcacaatcatgttgaccggccacatcatgttccagcaggccgggttgattgccgttacgctgtttatcttcggctactccatgtggaccaccattatctgtaccgcgattctggttagcctctactggggcatcacttccaacatgatgtacaagccgactcaggaagtgacggatggctgtggtttctccatcggtcaccagcagcagtttgcaagttggattgcctataaagtcgcgccgttcctcggcaaaaaagaggagagcgttgaagacctcaaattgccgggctggctgaacattttccacgacaacatcgtctccacggcgattgtgatgaccatcttctttggtgccattctgctctccttcggtatcgacaccgtgcaggcgatggcaggcaaagtgcactggacggtgtacatcctgcaaactggtttctcctttgcggtggcgatcttcatcatcacgcagggtgtgcgcatgtttgtggcggaactctctgaagcatttaacggcatttcccagcgcctgatcccaggtgcggttctggcgattgactgtgcagctatctatagcttcgcgccgaacgccgtggtctggggctttatgtggggcaccatcggtcagctgattgcggttggcatcctggtcgcctgcggctccagcatcctgattattcctggctttatcccgatgttcttctctaacgccaccatcggcgtgttcgctaaccacttcggcggctggcgtgcggcgctgaagatttgtctggtgatggggatgatcgaaatctttggttgcgtctgggcggtgaaactcaccggtatgagtgcctggatgggcatggcggactggagcattctggcaccgccgatgatgcaaggcttcttctccatcggtatcgcctttatggccgtcatcattgtaattgcactggcttatatgttcttcgctggccgcgcgctgcgcgcagaagaagatgcagaaaaacaactggcagaacagtctgcttaataaggagttttgattatgaccgtacgtattctggttgtgtgtggcaacggacaaggcagttccatgatcatgaagatgaaagtggaccagtttttaacccaaagtaacattgaccatacggtaaacagctgcgcggttggcgagtacaaaagcgagttgagtggcgcggatatcatcatcgcttctacgcacattgcgggcgaaatcaccgtgaccggcaacaaatacgtggttggcgtgcgcaacatgctctctcctgccgactttggcccgaaactgctggaagtgatcaaagagcatttcccgcaggatgtgaagtaaggacgcgccatgaaattacgtgatagcctggcggaaaataaatccatccgcctgcaggctgaagcagagacatggcaggaagcggtgaaaatcggcgttgacctgctggtggcggcagatgtggtagagccgcgttactaccaggcgattctggatggcgttgaacagttcggtccttatttcgttatcgctccgggcctggcaatgccgcacgggcgtccggaagagggcattaagaaaaccggtttctctctggtaacgctgaaaaagccgctggagttcaaccacgatgacaacgatccggtggatatcctcatcaccatggcggcggtcgatgccaatactcaccaggaagtgggcatcatgcagatcgtcaacctgtttgaagatgaagagaattttgaccgtttacgcgcctgccgtaccgagcaggaagtactggatctcattgaccgcaccaacgcggcagcttaagaaggaattgaacatgagtttaccgatgttgcaagtcgcgctggacaaccagactatggatagcgcctacgaaaccactcgcctgattgccgaagaagtcgacattatcgaagtgggcaccattctgtgcgtgggcgaaggcgtgcgtgcggttcgtgacctgaaagcgctctacccgcacaaaatcgtactggcagacgccaaaattgccgatgcaggcaaaatccttagccgtatgtgcttcgaagccaacgctgactgggtgacggtaatttgctgtgcggatatcaacaccgccaaaggcgcgctggacgtggcaaaagagtttaacggcgacgtgcagatcgaactgaccggttactggacctgggaacaggcgcaacagtggcgcgatgcaggcattgggcaggtggtttatcaccgcagccgtgacgcgcaggccgcaggcgtggcgtggggcgaagcggacatcaccgcgatcaaacgtctttccgatatgggcttcaaagtcaccgtcaccggaggcctggcgctggaagatctgccgctgttcaagggtattccgattcacgtctttatcgcgggccgtagtatccgtgatgccgcttctccggtggaagccgcacgtcagttcaaacgttccatcgctgaactgtggggctaaggagcggatatgttgtccaaacaaatcccgcttggcatctatgaaaaagcgctccccgccggggagtgctggctggaacgcctgcaactggcaaaaacgttaggcttcgattttgtcgaaatgagcgtagatgaaactgacgatcgcctgagccgcctcaactggagccgcgagcagcgtctggcgctggtcaatgcgattgttgaaaccggcgtgcgcgtgccgtccatgtgcctttctgctcatcgtcgtttcccgctgggcagtgaagatgacgcggtgcgggcgcaggggctggagattatgcgtaaagctatccagttcgcccaggatgtcggtattcgcgtgatccagctggcgggctatgacgtttactatcaggaagccaataacgaaacgcgtcgtcgtttccgtgacggcctgaaagagagcgttgagatggcaagccgcgcgcaggtgacgctggcgatggagatcatggattatccgttgatgagctccatcagcaaggcgctgggatacgcgcactatctcaacaatccgtggttccagctctacccggatatcggcaacctgagcgcgtgggacaacgatgtgcagatggagttgcaggccggaatcgggcatatcgtcgcggtacatgtgaaagacaccaaacctggcgtcttcaaaaacgtgccgtttggcgaaggtgtagtggatttcgagcgttgtttcgaaacgctcaaacagagtggctattgcgggccgtacctgattgagatgtggagcgaaacggcggaagacccggcggcagaagtggcgaaagcgcgtgattgggtgaaagcgcgcatggcgaaagcgggcatggtggaggcggcataatgcaaaagctaaaacagcaggtatttgaagccaacatggagctgccgcgctacgggctggtgacctttacctggggcaacgtcagcgctatcgaccgcgaacgcgggctggtggtgatcaagcccagcggcgttgcctacgaaaccatgaaagcggccgatatggtggtggttgatatgagcggcaaggtggtggaaggggagtatcgcccatcttccgacactgcgacgcatctcgaactctaccgtcgttacccgagccttggtggcattgtccatacccactccactcatgccaccgcatgggcgcaggcggggctggcgatcccggcgttaggcaccacgcacgccgactacttctttggcgacattccgtgtacgcgcgggttaagcgaagaagaggtgcagggcgagtatgaactgaacaccggcaaagtgattatcgaaacgctgggcaacgccgagccgctgcatacgccgggaattgtggtgtatcagcacgggccgttcgcctgggggaaagatgctcacgatgcggtgcataacgcggtggtgatggaagaagtggcgaaaatggcgtggattgcccgcggcattaacccacaactcaatcacatcgacagcttcctgatgaataaacacttcatgcgtaaacacggtcctaacgcttattacgggcagaagtaaaacacgcgctgcggaaatttccttcctcgggagataactggtctaattccgcagccgtttttcaaaaaaaagccccctgcgaagggggcaaagcaaactatggcaatgtttcgttggttatacctggtgttagcgataaatatccgcgctggcgtgcatattgccgttactccccggttcccgcatcagaattacgtggtagtacgttgcgccttgcgcatctgtttcttcatttaatgcctgacgtgcttcgctttcagtggcgaaattatgattgatataaatcacgcctaagctttgcacatcgtccatatttctggcctggtggttattaatttcaatggctgcccatgtatttgcacttagcaaaagcacagccagaagggctaaaacacgactgaacatagatacctcctcgacggctgactttgtgtgctctcctctgtgatgatcttctgatttaattttaatcaatgataaagaagttgatggtgaccatttctgatgcagttgttcaaaaaaacaccatgatgaagtgtgatgaacttcaaatcagcgtgttagaggttaattgcgaaaggggagatttatttcggctctgcccttgagtttagcgaggcatacaagtactataacgcgtcatttttcagccgacctttaacacgttccttgcctccccgggattcggctgacccagacaggaggctgaataatccgtaaggagcaattcgatgcgtcattacgaaatcgtttttatggtccatcctgaccagagcgaacaggttccgggcatgatcgagcgctacactgctgccatcactggtgcagaaggcaagatccaccgtctggaagactggggccgccgtcagctggcttacccgatcaacaaactgcacaaagcacactacgttctgatgaatgttgaagctccgcaggaagtgatcgatgagctggaaactaccttccgcttcaacgatgccgttatccgcagcatggttatgcgtaccaagcacgctgttaccgaagcatctccgatggttaaagcgaaagacgagcgccgtgagcgtcgcgatgatttcgcaaacgaaaccgctgatgatgctgaagctggggattctgaagagtaatttctgatgaccaaccgtctggtgttgtccggcaccgtgtgcagggctccccttcgaaaggtcagtccaagtggaattcctcactgccagttcgtgcttgagcatcgttctgtgcaggaggaagccggctttcaccggcaggcgtggtgtcaaatgcccgttattgttagcggacacgaaaaccaggccattactcacagtataacggtcggcagtcgcataaccgttcaggggttcattagttgccacaaggcaaagaacggactgagcaaaatggttttgcatgccgagcagattgaattgatagattctggagactaaccatatggcacgttatttccgtcgtcgcaagttctgccgtttcaccgcggaaggcgttcaagagatcgactataaagatatcgctacgctgaaaaactacatcaccgaaagcggtaagattgtcccaagccgtatcaccggtacccgtgcaaaataccagcgtcagctggctcgcgctatcaaacgcgctcgctacctgtccctgctgccgtacactgatcgccatcagtaatcggtcacggtccattaatacgactttgagaggataaggtaatgcaagttattctgcttgataaagtagcaaacctgggtagcctgggtgatcaggtaaacgttaaagcgggctatgctcgtaacttcctggtaccgcagggtaaagctgttccagctaccaagaaaaacattgaattcttcgaagctcgtcgcgctgaactggaagctaaactggctgaagttctggcagctgctaatgctcgcgctgagaaaatcaatgcactggaaactgttaccatcgcgtctaaagctggcgacgaaggtaaactgttcggttccatcggtactcgcgacatcgctgacgctgtaactgcagctggcgttgaagtggctaagagcgaagttcatctgccgaacggcgttctgcgtaccactggcgaacacgaagtgagcttccaggttcacagcgaagtattcgcgaaagtgatcgtaaacgtagtagctgaataattcgttattcaacgagacgtaaaaacgccgaccattggtcggcgttttgctttctatttttcgtcaggtattagtttcgcaagtagatccattcaccattctcttgtgtccataagtcaggatggtttgctggcgttagatacatacgagcgcaactgatgtctcgctcctgcggcactcgctcgaaacccaaaccgctgtagattgcggcactactacttaaggaacgcagaccaattttcaaatcatggggtaaatcagaatacgcgtttagcaatgcagcaatgatgaatccgagggcattagaaacgcctgtaacagtgcgaagttggtcgatataaagatcgattgttggtagttcagaactccagcaattaggcatttgggcaggaagggttacaacgtatcctatcgtttggccggtatagtctggagtaccataaccaggtcccaaaaccacttcgtgtattgtgtatttactgttgggttcgaaggattcgacatcttgcaataaatatttcagttctgcggttaacctcgcacccgcgtaagctttattgtatttctgggcgtgaatattatctaatgtagcttcatggttccatccaaaagaattatcaccattcattgtgattccatcgtaagcattacacctcgtcgctaacttattgaatgcttgccagtcactgagatctagtttgtggatctcaacagtacgtctgccatcgcaattatgatctcttccacgattactaagtaatgtagcgcgtgcgtattgatgaaattttaattttactggtttgtcggtggagctaaaacgagataaatatgcaggaaaactataaatagtcgttggtaatgtcattgtaatgttacctgtttaatgtttttataaatatcgcagctgaatgttcacagaaaaaaatcgatattaataaaaataagtttgttttctgaagtggtgaaaatagcggatggtgaaagatattaatatcaaaaatcgctcattatggatataacgatgcacccggggagaaaatgacttccacgccttacaccgtacattcttgttgtgcggtatgtaattattctacgctgtcggtatcggtgtattcgttaatcagcaggttagccagccacaaaaagccattgagaaaattattgattttacatgggattattatattgctaatccttggtttttaaaaattgtgcatagtgaaaatcaaagtaaaggtgtgcattatgcaaaaagtcagcgtctcttagaaattaaccatgcgcacttgcagttaatggaatccttattggatgaagggaagaaacacaatatttttaagccagatatcgacccattgcaggtgaatattaatattgctgcgcttggcggatattatttgatcaaccagcatacgcttggcctggtttatcacatcagtatggttagtccccaggcactggaagccagacgtaaggtcatcaaagagacaatccttagctggcttttggttgaccctagttctaccgcgcacgaataattaccgcgcacgaataaaactgccatccggctggcgggtgaacaggacctgttgattattccccgtatcaatggttaagcccgtcaccacgccgctggcgttctggcggattttcaccatctgcccgttttgcaaattactcagcggcttacccgcgccttctacctgcgccattgcatagacatcggtagcgggcagtccgtggtcgcggaacagctgcgccatcgttttaccgggttcgacacggtaagagcgccattgattatcaattccgctatctggctggaatggttgcgtttgggtagtttgcggctgctcttctggctggccttcctgtataggttctggagcgaccggagccacctgatcaggaccattttgtggggtaactaattgcgcccgcagctgttcttctgtcggcggttgactttggctctgaatatctaactgcgcttcacgcgtcaccaccggcgcgttgggcgtatcatcagatggaagcagaaatccgaccaccaatacaatggcggcaataatgatcccccgacgatgcatcggcggcagcgggtccatgaagcgaaaattgtccggcgcgtgccagactttctccagggttggttttagttcaaagcgcccgggcatggtttcctcctgctccgcgtcttgttcctcaatcatagcctatgaataagctaacgctatgatgtccgtggtaaacccgcctttattatattcatacgggatattgctattgtttctttttccctgggatttgtcatcattcccgcgacaaagttttacccaaagaagtgtggctgatatgctgcccgctactttataccctaagaaaggaaatacgatgaccaccccaacttttgacaccatcgaagcgcaagcaagctacggcattggtttgcaggtagggcaacaactgagtgaatctggcctggaagggctgctgccagaagcactggttgcaggtattgccgatgcgctggaaggcaaacatccggctgttccggttgatgtggtgcatcgcgcgctgcgtgaaatccacgagcgcgccgatgccgttcgtcgtcagcgtttccaggcgatggctgctgaaggtgtgaaatacctggaagaaaacgccaaaaaaagaaggtgtgaatagcaccgaatctggcctgcaattccgcgtgatcaaccagggtgaaggcgcaattccggcacgtaccgaccgcgttcgtgttcattacaccggtaaactgatcgacggcaccgtgtttgacagctccgttgctcgtggtgaacccgctgaattcccggttaatggcgtgatccctggctggattgaagcactgactctgatgccggtaggttctaaatgggaactgactatcccgcaggaactggcatatggcgagcgcggcgcaggcgcatccatccctccgttcagcaccctggtgtttgaagtcgaactgctggaaatcctctaagcagcgcattctgttcccctcgaacgagaggggagcaggcattcagcaataaacccttcagtttgccaaacggcgctattttgtgttgcaaagaccccgtaagcgtgtatttttgtgagctgtttcgcgttatcaccgtgatatgacactcactttaaacataaaattaacattagatctaaatcttagtattcatcccgcgtattgttacctaatatcgatgagtcccgatacagattcgtcgtatcatagactgactaaaggccgtagagcctgaacaacacagacaggtacaggaagaaaaaaacatggtagatcaggtaaaagtcgttgccgatgatcaggctccggctgaacagagcctacggcgcaatctcacaaaccgacatattcagcttattgccattggcggtgccattggtacggggttgtttatggggtctggcaaaacgattagccttgccgggccgagcatcattttcgtttatatgatcattggttttatgctctttttcgtgatgcgggcaatgggggaattgctgcttagcaatctggaatacaaatcttttagtgacttcgcttccgatttactcgggccgtgggcaggatatttcaccggctggacttactggttctgctgggttgtaaccggtatggcagacgtggtggcgatcacggcttatgctcagttctggttccccgatctctccgactgggtcgccagcctggcggtgatagtgctgctgctgacgctcaatctcgccaccgtgaaaatgttcggtgagatggagttctggtttgcgatgatcaaaatcgtcgccattgtgagcctgattgtcgtcggcctggtcatggtggcgatgcactttcagagtccgactggtgtggaagcgagtttcgcgcatttgtggaatgacggcggctggttcccgaaaggtttaagtggcttctttgccggattccagatagcggttttcgctttcgtggggattgagctggtaggtacaacagctgcggaaaccaaagatccagagaaaagtctgccacgcgcgattaactccattccgatccgtatcattatgttctacgtcttcgcgctgattgtgattatgtccgtgacgccgtggagtagcgtagtcccggagaaaagcccgtttgttgaactgttcgtgttggtagggctgcctgctgccgcaagcgtgatcaactttgtggtgctgacctctgcggcgtcttccgctaacagcggcgtcttctctaccagccgtatgctgtttggtctggcgcaggaaggtgtggcaccgaaagcgttcgctaaactttctaagcgcgcagtacccgcgaaagggctgacgttcagctgtatctgtctgctcggcggcgtggtgatgttgtatgtgaatcctagtgtgattggcgcgttcacgatgattacaaccgtttccgcgattctgtttatgttcgtctggacgattatcctttgcagctaccttgtgtatcgcaaacagcgtcctcatctacatgagaagagcatctacaagatgccgctcggcaagctgatgtgctgggtatgtatggcgttctttgtgttcgtggtcgtgttgctgacactggaagatgacactcgccaggcgctgctggttaccccgctgtggtttatcgcgctggggttgggctggctgtttattggtaagaagcgggctgctgaactgcggaaataaccgcattatcatgctggatggcgcaatgccatccagcttttagatcactcacccgccagcgcgcgtgggaacagtacattgttttccagactgatgtgatccatcaggtcatcaatcagttcattaatgccgttatacatcgctttccaggtggtgcaggcttctggcggcggtgtgacgttattggtggtgtgtttaatcacttccagcagttcgcccgcttcatcgtgctcgctttccattacgctgattggccccattgcctggctgcccatgccttgtttgatcatcgggaagaggatctgctcttctttcatcatgtggctggaaagctcttcatgcagcatggtcaggtattttgtcagcccttttggcacgctcggtttgtcggcgtgaacgcgctcgactttagtcgcttgcagaatcagctccggcagttgctcgcggtgacgatcgtggtagcgcacgatgatatggtcgatgatttctgccagcggggcgctacgccagtctttctcaatcggttgttcagcgagctttgccagttcagcttcaatgacctcaacatccagttctttacgtgccgccgcgcgcgccagcgtctgcttaccgccacagcagtaatccatatcatatttacgaaacagagcactagcgcgaggaatagagagcgccagttcacctaaaggttggtcgcgataagccatagctgatacctcattcttaataagataagatgtattttaaatgcatctttaaggcaaaagctataacccttacgtagcagaggcttatttaactcactgccagcgtgtcaactttcactgacagattcagttaaaggtttttctggttttgctctgaccgcgatgaccacgccaatcactaacagcgcgataccgctcagcgtcattagcggcggcatttgctggcggagtaaaaaggtgtacagcaaacctgccagcgtttcgaaaacaatcagcggcccgagaatcactgtcggtaatagctggctggcgacgttccagcagagtgcgccaacccaactgcaaagcacggctatcgcaaccatcagactaataaacaccagcggacgggggccaaagggtagggagaagtccggcgtttgcgtattcagccagtaacaagcgacgagatagccgataagactaaccggcagtgtgaccagcgcctgcgctgttgcccacatcatcggatgtttgtcgggattttcccgcagccagcgggcgttgcgcagggcataccacgcccagcagaccacggaaactaacgccagcacgatgccagaggtataacgtgcccagtcaaaatcggggagtccgtggtttaactcagcaatattcacacacgccaggccgatgccaatacaaatcagtgctggggcgagttttccccacgcgagtttgccgtcgcgctggctataaagcagattggcaaagacaggaatgaccaccggcagggtgccgataatcatcgtggaaacaggcgcgccagtacgttgaatggcactggcaaggcagaagtaatagatgaggttgcccatcatagtgagcatcaaggcggtaagccagtcgcgacgcgccaactgacgcagacgcacgcgtcccagccaggcaatgggcagcgcaattaaccctaacgccagataacgccccatgctctgcaacatcgccgggtattccggcacgatcaacggcccgacaaaaataagcccccacatcaaccctgctaacagggcgtacagcacgccgctaatcattactggcatccattgatctgtcagaagaaagttcaggaagcagacatgattgctcccggcatcccgtcattatcagagaggatgcgggaggatgccactttaattaattagttattaacattaaaaagatggcttacgctttcggctaacgttgtcgttgggtggccaatcaatttgctaagtgttttgctgtcatcaaacagaccgcctttgcttgcgccaacgtcagaatccgccagcatatccgccagtccgtcgggcagtccgacgcttttcagtgccgcggcgaaatcggcttcgctcagattttgataggtaacctgtttgccgctctgtttggtcagctctgccgctaactgtgtcaacgtccaggcactatcgcccgccagttcgtaaaccttgccttcgtgaccggcttcgctaatcacgcgtgccgcagctgccgcataatctgcccgcgttgcactggcgattttgccatcgcccgccgcaccgataaatacgccgtgttccagtgctgccggggcgctggcgaggtagttttcgctgtaccagccgttgcgcagcagggtgtaaacgatgccagaatcagccagcattttctccgtctcgatgtgctcatcggcgaggccgagcggggaggtatctgcatgtagcaggctggtataagcgataaatttcacgccagccgcctttgcggcattaataacattacgatgctgcggggcacgttgacccacttcgctggaagagatcagcagtagtttttccactccctgaagtgcagatgtcagtgcggcttcatcgccgtagtcagcctgacgcacggtaatgccttgtgctgccagggcttgggcttttgccggattacgaacgatagccactatttggctggcaggaaccgttttcatcaaggattcaataacatagtgaccaagttggccagtggcaccagtaatagcgatcatgggaagtctccatcgttttgtcttgtgtttaaatacgctaacacctaaacttacttttagtaagtacgtacaaaaaggtaagtatgaaatgagtcaggttagcctgagccaacaactgaaagagggtaatctctttgcggaacagtgcccgagccgcgaggtgttgaaacacgtcaccagccgttggggggtgttgattctggtggcgctacgcgaaggtactcatcgctttagcgacctgcggcgcaaaatcggtggggtgagtgaaaagatgcttgcgcagagcttacaggcgttagaacaggatggttttcttaaccgtatcgcgtatccggtggtgccgccgcatgtggaatatagcctcacgccgctgggcgagcaggtgagcgaaaaggttgctgcactggcggactggattgagttgaatttgcccgaggtgttggcggtgcgggatgaacgtgcggcataactgccggatgcgctgagcttatctggtctacggtgcatggcttgtagggcggataagatgcgccagcatcgcatccgccaataaatgccggatgcggttgatgatttataggccgaaaaagaagtgttttacttactcaaatccacctgataaatcgcaaacccgatatcatcggtcgcgactttattcatcggatactgccctttctctttaataaacgctgcggctttatcactcggagaggtttcgaaacggatatccagtttcttatcgccagctatcggtgctaaacgccagttgttatctgccgccgggtgaatttcccccgcacgtttgctctcatcagcaatccacgctgccagcacgctgcggttctcatccggactagcaaaagcgatatggctgtcgcccgtaccggcaaatttgccgccgtaagcgcgatagttattggtggcaaccaggaacatggcgttcggatcaatcggcttgccattaaaggtcaggttcttaatcctttccgcattggcattaatcatctggcactcgccgtcataacgggcgggctgggtaacatcaatctgataattcacaccatcaataacatcaaagttataagtgcggaaaccatcccagttgatgagactctgtggtttcgtgctgttgggatcaatctggttaaactgtcccgcggagcactccagccactctttcacctctttaccgctggctttcaccacaatcagcgtattgggatagagataaagatcggcggcattacggaaggtcaactggcctttttccacctccacatagcttgccgggtcatttttgcgaccaccgactttaaacggtgcggcagcactaagcaccggcagttttgccagatccggatcgccctgaatgtaatgctcgacatacgctttttgcgcgttgttcaccacctgcacggtcggatcgtcctgcaccagcgccagatagctatacatattgtcggcagatttaccgattggcttgctgacgaactggcgtgtggcatcgtgatcggctttgagtgtttctaccagcttgctgtcttccgccgcgagggattttttattagcgatgtcgtaaatcggtcgtgcttccgctttcgcctgcgtcacctgccatttaccgctgtcattactgagttgtaagtcgaccacaccaagatgatcgccccacatgcctggcattaccgccggaacaccattcagcgtgcctttggcgatatcagccccttcgatatcagcaaaatctttacctgggaaaacggcgtgagcatggccaaacataatggcgttaacgcccggaatttcactgaggtaataaacactgttttccgccatcactttatacggatcggcagatagcccggaatgtgccagaacgacaacaacatcggcacctttctcgcgcatttcaggcacgtatttgcgcacggtttcggtaatatcattcaccgtcactttcccggataaattagctttatcccagcccatgatttgtggtggcacgacgccaatatagccaatcttcagcgtctgtttttttccgtctttatcgaccacttcggtgtctttaattaaatacggtgtaaacattggctgtttggttctggcgtcaatgacgttggcatttacataagggaatttcgctcctgccagcgcatttttcaggtaatccagaccgtagttaaactcgtggttgccaagcgttccgacggtatagtccagcgtatttaatgccttatagaccgggtgaatatcacctgcttttaatcctttcgcgctcatgtaatcggccagcggactcccctgaatcaaatcgccgttatcaaccagtacgctgtttttcacttcattgcgggcatcgttaatcaggcttgccgtacgtaccagtccgaatttttccgtggcggtgtctttgtaataatcgaaatccatcatgttgctatgcagatcagtggtttccatgatacgcagatcgaccgtcgctgcattcacactggcggcaatcagcgtggccaggagcgttgcgctaaacttaatcatcagggacatccttttatcatcgggaatacgaaagaaaagggagaataaacgtcttacttatagaacagtgaagaatgccacaattttacgctttgaaaatgatgacactatcacagttggcgcattcattaacgatagggtataagtaaaacaataagttaacaccgctcacagagacgaggtggagaaatgttagatcaagtatgccagcttgcacggaatgcaggcgatgccattatgcaggtctacgacgggacgaaaccgatggacgtcgtcagcaaagcggacaattctccggtaacggcagcggatattgccgctcacaccgttatcatggacggtttacgtacgctgacaccggatgttccggtcctttctgaagaagatcctcccggttgggaagtccgtcagcactggcagcgttactggctggtagactcgctggatggtactaaagagtttattaaacgtaatggcgaattcaccgttaacattgcgctcattgaccatggcaaaccgattttaggcgtggtgtatgcgccggtaatgaacgtaatgtacagcgcggcagaaggcaaagcgtggaaagaagagtgcggtgtgcgcaagcagattcaggtccgcgatgcgcgcccgccgctggtggtgatcagccgttcccatgcggatgcggagctgaaagagtatctgcaacagcttggcgaacatcagaccacgtccatcggctctagcctgaaattctgcctggtggcggaaggacaggcgcagctgtacccgcgcttcggaccaacgaatatttgggacaccgccgctggacatgctgtagctgcagctgccggagcgcacgttcacgactggcagggtaaaccgctggattacactccgcgtgagagcttcctgaatccggggttcagagtgtctatttactaaattcagatggcagaaacagtgtatttcctgattctgccatcctgatttctcccaacctaaaaagttataaataaaaagagattgtatttaaagtgcaaaaattcaattgctaataagttacattttaataatgagcgttttttgatagtttacttctatagtgagatatttaatggcgacataaagtaaccaaataaaataaggttgtcatatgttacccaggatcagacacaataattttattggtgcggtggagttatttgtaaagtctagctatacaaaaacacatagtaacaatttttttaacaacatccatcatgcatttaagaaaaaagattggattagcaattatgatagcctgttaactttgagggagttctttcgttgcgcaactcagattgataaaagtggttatcaggtgcttagtagtaaaaatgaaactgttcacgccatggataagtttcttatcagtttcagccttaaagataacggtgccgaatatacaatgacattgcgaggtagtggatttgaatacgaagaaatacccataacaataaatgaatataacagtttcatggatttcaaaaaccgtgaatttccgttagaacaaaacagacgattgtatgcccgggatattctacagaaaaaacagtctgacataccgaaaaggattaaaggttatattcaccaggcgattggtgacgtgtctttaggttatgccttattggaggatatagtaagcaaattaaaacggggtaaatttgaactccaaataccaggaggtggaattaaagaatgcgatggatggtatatttacgaaaaaataattgatgataattttgccatagtcatagaatctttgggctttgcgcttaaaatctatggaggggatgaacgttttcgtaatggttcctctgttgttttggaggatgaagattactctcttatttataattttctggttaatgcaggttgccaacaagtcgaattagccgaacaagtggatgcgatagtaagtgcgaatctggccgcagatagcgatattaccaaagaaaagatttgcgagaaatataaaagcaccattgaggcgtttaaaaaagagcaactagcgttaccagtattagttcggcgtaagaacagtgagacttaattcccctatcccatagataacgataggggaaaattatttttgcagaatttatgttattgccattatttgagcaacttttgcagcaggtccatcacttgctgcacctcttccggtgtgagcgccccgtctttggcccattgcacgcgaccatccttatccagcaccactacagcggaactttcttcatccagctgccaggcaccgagcgcgacgccattgctatcgacaataaactggctccagggataaagctttttattactctccagactgctgcgcacaaacatcccactacccggaatcgcgtcgtcggtgttaacaatggtggtggtctggtaacgatcgtgcggtaacttcgcacttttaatcgcttcaatcagcgtcgcgtttttctcttttgcagaggtgcgaccagcaatatgttgcagtactcgcacttttcccactaactgcgcgctgttccaggttttgtagctaaactgatctttatcaagcaccaactcgccccgatcggtaatgccaatcggcggcactcgctgaccggtttcgaactgatgtgcggaagccatcatcggcaacagcaggcaggtgagtgccagaatcttgcgtagggtcatggtgtttccttcttatgatatgcaggtgatccgaccacttgggtctgagttttaatcatatgtgctatttatcgaatttcccgcaagtgtgatgccagtttgcggtcaagcgcacaaatcatatgaaaaatgaatgcttatactgaagaccgcgcttcggtaaaaagataattctgaataattgtaacctttaggtaaaaaaagttatacgcggtggaaacattgcccggatagtctatagtcactaagcattaaaatttgcgcctcataatagttgggccgattgtggcaccgcacaggcgtaatactcagcaggagataacaatgaaaattttccaacggtacaacccacttcaggtggcgaagtacgtaaagatcctgttccgtggacggttatacatcaaggacgttggcgcttttgaattcgataagggtaagattcttatcccaaaagtgaaggataagctgcatttgagtgtgatgtccgaagttaaccgtcaggttatgcgtctgcaaacagagatggcttaaccaaagtgctatgcagtaaaaagtgctatgcagtaataagacggctcctgattcaggagccgttgatgtttctgggggttacgcgacgctttcttctttatctttagcgtcaggcagttttgggctaagggcggtggccttgctgtcgatccgggtcaccagcagctggtcgatgcggtagttatcgatatccaccacttcaaatttgtagccggcgaatttcacgctatcggtgcgtttcgggatcttacgcagcataaacatcataaagccgccgatggtttcgtagttgccgctctgcgggaactcgtcaatatccagcacgcgcatgacgtcgtcaattggggtgccgccgtcaatcagccaactgttctcatcacgggcgacaatctgctcttccagcccctgaccgaccagatcgcccatcagcgtggtcatcacgtcattgagggtgatgatccccaccaccagcgcgtactcgttcatgatcaccgcgaagtcttcacctgcggttttaaaactttccaacgcctcactaagggttaacgtatccggcacaatcagcgtgttgcgaatttgtacgccgctgttcagtgccaggctttggttagccagcacgcggttcagcaggtctttagaatcgacataaccgatgatgtggtcaatatcttcattacagacgaggaacttagagtgcggatgttccgccaccttattcttcaggctttgctcatcttcgtggagatcaaaccaaatcacgttttcacgcggtgtcatactagacggaacggtacgggattccagctcaaagacgttttcaatcagctcgtgttcctgtttacgtaacacgcccgccagcgcaccggcttccactaccgcgtagatgtcatcagaagtgatgtcatctttacgtaccattggcagtttgaaaatacggaagattatgttcgccaggccgttgaagaaccacaccagcggggtgcaaacgtacaggcagaagcgcatcgggttgatgatacgcaaagccacagcttctggcgcaatcataccgatgcgtttcggggttaaatccgcaaacaggataaacatgccagtcactaagctgaaagagagaataaagctcagttgctcagagagctctgcgctcatatagcgggagaacaggctgtgaaaagctggagaaaatgccgcatcaccgacgataccgccgagaatcgccactgcgttcagaccgatttggaccacggtaaagaacatgccgggattttcctgcatattcagaacgcgttgggcatttatattgccttcatcagccagcagtttaagtttgattttgcgactggcggcaaggctgatctcggacatgctgaagaacgcacttacagcgatcaagcagagtatgactaaaatactgtttaacatatcttatccgacctttcaggccagatcctcggaaggggaagttgattaatttgtgtgaaatacacattgaaagccgattcgaagaaagtgaaccggcattttcagtggctagtatagcgtaaggtactgtaaagccgccagagggttaaaattcagacagctgaaaaatgcaaaactgcctgatacgctatgccgatcaggcctacgcagtccttgcaatatattgaatttggacgattttgtaggcctggtaagtcgtttacgccgcatcaggcatagacaaagagcactttatcaacaaactacatttgtacccgtaacgttatgcttccggcggcagacagacgccaattccgccaattccacagtaaccatacgggtttttatgcagatattgctggtggtcatcttcggcataataaaacggtgtggcgttagcgatttccgtggtgatgtgacgatcgtcatcggcggcaagcatcgccgcctgaaaacgttccagactggcgcgagctgcggcatcctgttctggggtcagcggataaatcgcactacgatactgcgtgccgtggtcattgccctgacgcattccctgggcgggatcgtgattctcccaaaatacctgtagcaactgctcatagctgatgacggaaggatcgtaaacaatgcgtaccgcttcggcatgacccgtatcaccggagcacacttcccgataagtcggatttggcgtatagccgccggtatagcctgcggcggtgctgtaaacgccgggtaactgccagaacagacgctccacaccccagaaacaacccatcgcaaaaatggcaatctccattccgtcaggtacattggtcatactgtgaccgttgaccgcatgcagcgtggctacgggcatcggggtgttacgtccaggcagggcatcggcgggggaaaccagatgctttttatcaaataaactcatggtgtcgctctcccgaaaatcggtcattggggttaaggttgtaacaagaggcgtatttgcacacaataaccaccgtgaataggtctaaagtaaaacataagaaatatttggggtttagtctgctttttaatccatattactggatttttgttaagccgtttaacggcgttccaggggcaggaaaaaaggatattcaggagaaaatgtgcgctatatccgacagttatgctgtgtaagcttactctgcttaagcggatctgccgtcgccgcgaacgtccgtctacaggtcgaggggttaagcggacagctggaaaagaacgttcgtgcgcagctttctacgattgaaagtgatgaagtgacgccagaccgtcgctttcgcgcacgcgtcgatgatgccatccgcgaaggtctgaaagcgctgggttattaccagccgaccattgaatttgatctccgtccaccgccaaagaaagggcggcaggtattgatcgccaaagtcacgccaggcgtgccggtgttaattggcggcaccgatgtggtattgcgcggcggcgcgcggaccgataaagactatttgaaattgctcgatactcgcccggctattggcacggtactgaaccagggcgattatgaaaatttcaaaaagtccttaaccagcattgcgttgcgtaaaggttatttcgatagcgaatttaccaaagcgcagctgggcattgcgctcggcctgcataaagccttctgggatattgattataacagtggcgaacgttaccgctttgggcatgtgacctttgaaggaagtcaaatccgcgatgaatacctgcaaaatctggtgccgtttaaagagggcgatgagtacgaaagcaaagatctggcagaactgaaccgccgactttctgctaccggctggtttaacagcgtggtggtggctccacaatttgataaagcgcgcgaaacgaaagtattaccattgacgggcgtggttagcccgcgaacagaaaacaccatcgaaaccggggtcggttactctacggacgtgggaccgcgcgtgaaagcgacgtggaaaaagccgtggatgaactcttatggtcacagtctgaccaccagtactagtatttccgcgccggaacagaccctcgacttcagctataaaatgccgctgctgaagaatccactggaacaatattatttggtgcagggcggttttaagcgcactgacctgaacgataccgaatctgactccactacgctggtggcttctcgctactgggatctctccagcggctggcagcgtgccattaacctgcgctggagtctcgaccactttactcagggtgaaattaccaataccacgatgctgttttatcctggggtgatgattagccgcacgcgttctcgtggtggcctgatgccaacctggggcgacagccaacgctactctatcgactactccaacacggcctggggtagtgatgtcgatttctccgttttccaggcgcagaacgtctggatccgcacactgtacgatcgccatcgttttgttacacgcggcacgctgggctggattgaaaccggtgatttcgacaaagtaccgccggatctgcgtttcttcgccgggggcgaccgcagtattcgtggctacaaatacaaatctatcgctccgaaatacgccaacggtgacctgaaaggggccagcaagttgataaccggaagcctggaataccagtacaacgtgaccggaaaatggtggggcgcggtgtttgtcgatagtggcgaagcggtaagcgatattcgccgcagcgactttaaaaccggtaccggggtcggcgtgcgctgggaaagcccggtcgggccaatcaaactcgattttgccgtaccggtcgcggataaagacgaacacgggttacagttttacatcggtctggggccagaattatgagtttatggaaaaaaatcagcctcggcgtggttatcgttatcttactgttgctgggaagcgtggcgtttctggtgggcaccaccagcggcctgcatctggtatttaaagcggcggatcgctgggtgccaggactggatattggcaaggtcaccggcggctggcgcgatctcaccttgtctgacgttcgttatgagcagccaggcgtggcggtaaaagcgggcaatctgcatctggctgtcgggcttgagtgcctgtggaacagcagtgtttgtattaatgatctggcgctgaaagacattcaggtcaacatcgacagtaaaaaaatgcctccttctgaacaggttgaagaagaggaagatagcggtccgctggatctctccacgccgtatcccatcaccctgacacgggtggcactggacaacgtcaacattaagattgatgacaccacggtaagcgtgatggacttcacctccggcctgaactggcaggagaaaaccctgaccctgaaaccgacgagcctgaaaggcctgctgattgctctgccgaaagtggcggaagtggcgcaggaagaagtggtcgaaccgaaaattgaaaatccgcagccggatgaaaagccgctcggcgaaacgctgaaagatctcttttctcgcccggtattgccggaaatgaccgacgtgcatttgccgcttaacctgaacattgaagagtttaagggcgagcagctgcgcgtgacgggcgacacggacatcaccgtgagcaccatgctgctgaaagtgagcagcattgacggcaatactaaactggacgccctggatatcgattccagtcaagggatcgtcaacgccagcggcacggcgcagctgagtgacaactggccggtggacatcactctcaacagtacactgaacgtggagccgttgaaaggtgaaaaagtgaagctgaaaatgggcggcgcgctgcgcgaacagctggagattggcgttaatctttccggtccggtggatatggatttacgcgcccagacgcgactggcggaagccggattgccgctcaacgtggaagtgaacagcaaacagctttactggccgttcactggtgagaagcagtatcaggcggatgatctgaaactgaaacttaccggcaaaatgaccgattacacgctctctatgcgtacggcagtgaagggacaggagatcccgcccgcgactattaccctcgacgccaaaggtaatgaacagcaggtcaatctcgacaaactcaccgtcgcggcgctggaagggaaaactgaactcaaggcgttgctcgactggcaacaggccattagttggcgcggtgagctaacgcttaacggcattaacaccgccaaagagttcccggactggccgagcaaactcaatggcttgattaaaacccgcggtagcctgtacggcggcacctggcagatggacgtgccggagttgaagctgaccggtaacgttaaacagaacaaagtgaacgttgacggcacgctgaaaggcaacagttatatgcagtggatgatcccagggcttcatctggaactcgggccaaacagtgccgaagtgaaaggcgagctgggggtaaaagatctcaatcttgatgccaccatcaacgcgccggggctggataacgcgctgccggggcttggcggtacagcgaaagggctggtgaaagtacgcggcacggtggaagcgccacaactactggcagatatcaccgcgcgcggcctgcgctggcaggaactttccgtggcgcaggttcgcgtggaaggcgatatcaaatccaccgatcagatcgccgggaaactcgacgtacgcgttgagcaaattagccagccggatgtaaatatcaacctcgtcaccctgaatgccaaaggcagcgaaaagcagcacgagctacagttgcggattcagggggagcctgtctccgggcagcttaatctggcaggaagttttgatcgcaaagaagaacgctggaagggaactcttagcaatacccgcttccagacgccggttggcccgtggagcctgacccgcgatattgcgctggattaccgcaataaggagcaaaaaatcagcatcgggccacactgctggcttaacccgaatgcggaactgtgcgtgccgcaaactatcgatgcgggggccgaagggcgtgcggtggtgaatctcaaccgcttcgacctcgccatgctgaaaccgtttatgccagaaaccactcaggccagcggtatcttcacgggtaaagcggacgttgcctgggacaccacgaaagaggggctgccgcagggcagtatcacccttagcgggcgtaacgtgcaggtaacgcaaaccgtcaacgatgcggcgctgcccgtggcgtttcagacactgaatctgacggcggaattgcgtaacaaccgtgccgaattgggctggaccatccgcctgaccaataacggccagtttgatggacaggtgcaggtgaccgatccgcaaggccgccgtaatcttggtggcaacgtcaatatccgtaacttcaaccttgcgatgataaaccccatctttacccgtggggaaaaagcagcggggatggtgggtgccaacttgcgtctgggtggtgatgtgcaaagcccgcagttgtttggtcagcttcaggttacgggtgtggatatcgatggcaactttatgccgtttgatatgcaaccgagccagcttgcggtcaactttaacggtatgcgcagcacgcttgccggtacagtacggacccagcagggtgaaatctacctgaacggtgatgccgactggagccaaattgaaaactggcgggcgcgggtaacggcgaaaggcagtaaagtgcggatcaccgtgccgccgatggtacgaatggatgtaagcccagatgttgtattcgaggctacaccaaacctgtttaccctcgatggtcgcgtggatgtcccttgggcgcgcatcgtggtgcacgatctgccggaaagcgcagtaggcgtctccagcgatgtggtgatgcttaacgataacctgcaaccggaagagccgaaaacggcgagcattccgattaacagtaacctgattgtccacgttggcaacaatgtgcgcattgacgcctttggcctgaaagcgcggctgacgggcgatctcaatgtcgttcaggacaaacaagggctgggtctgaacgggcagatcaacatccctgaagggcgcttccatgcctatggtcaggatctgattgtgcgtaaaggtgagttactgttctctggtccgccagatcaaccgtatcttaatattgaagctattcgtaacccggatgctacagaagacgacgtaatcgccggagttcgcgtcactggtctggcggacgaaccgaaagcggagatcttctctgacccggcgatgagccaacaagctgccttgtcttatttgctacgtggacaagggctggagagcgatcagagcgacagtgcggcaatgaccagcatgctgattggtttgggggttgcgcaaagtggccagattgtgggtaaaatcggcgagacgtttggcgtaagcaatttagcgctcgacacccagggagtaggcgactcctcccaggtagtggtcagcggctatgtattgccaggtctgcaagtgaaatacggcgtgggtatatttgactctatagcaacactcacgttacgttatcgcctgatgcctaagctatatctggaagccgtgtctggtgtagaccaggcactggatttgctctatcagttcgagttttaacaatgcgaatatttgtctacggcagtttacgccacaaacaaggcaacagtcactggatgaccaatgcccagttactgggcgatttcagtatcgataactaccagttgtatagcctgggccactatccaggcgcagttccggggaacggaacggtacacggtgaagtttatcgtattgacaacgccacgctggccgaacttgatgccttgcgcaccaggggcggtgaatacgcgcgccagttgattcagacgccgtacgggagtgcatggatgtacgtttatcaacgacccgtcgatggattaaagctaattgaaagcggcgactggttagacagggataagtaaccatatgcatacgccaccttcgggtggcgttgttttttgcgagacgactcgcattctgttttgtaattccctcaccttttgcttttctctccgagccgctttccatatctattaacgcataaaaaactctgctggcattcacaaatgcgcaggggtaaaacgtttcctgtagcaccgtgagttatactttgtataacttaaggaggtgcagatgcgtattaccataaaaagatgggggaacagtgcaggtatggtcattcccaatatcgtaatgaaagaacttaacttacagccggggcagagcgtggaggcgcaagtgagcaacaatcaactgattctgacacccatctccaggcgctacagccttgatgaactgctggcacagtgtgacatgaacgccgcggaacttagcgagcaggatgtctggggtaaatccacccctgcgggtgacgaaatatggtaaagaaaagtgaatttgaacggggagacattgtgctggttggctttgatccagcaagcggccatgaacagcaaggtgctggtcgacctgcgcttgtgctctccgttcaagcctttaatcaactgggaatgacgctggtggcccccattacgcagggcggaaattttgcccgttatgccggatttagcgttcctttacattgcgaagaaggcgatgtgcacggcgtggtgctggtgaatcaggtgcggatgatggatctacacgcccggctggcaaagcgtattggtctggctgcggatgaggtggtggaagaggcgttattacgcttgcaggcggtggtggaataaggtgtgtttatttatcgcgggcataaaaaaacccttactaaccgaagcccggcgttcagggttattacgccagaagaacttatttattctttgcgcgctcgaaggaggcaacgatttcagctttagcggcttctgcgttttcccaaccttcaactttcacccacttgcctttttcgaggtctttgtagtgctcgaagaagtgagcgatttgcgctttcagcagttcaggcagatcgttaacgtctttaatgtgatcgtattctttgctcagcttgctgtgcggaaccgcaaccagtttcgcatcttcaccggcttcgtcggtcattttcagaacgccaaccggacggcaacggatcacagaacccggctgcagcgggtacggagttgggaccagtacgtcaaccgggtcaccgtccagagacagggtgtggttgatgtaaccgtagttgcatggatagaacatcgcggtggacatgaagcggtcaacgaacagtgcgccgctctctttgtcgatttcgtatttgatcggatctgcgttagccgggatctcaataacaacgtagatgtcttccggcagatctttacccgcagggacgttgagtaagctcatgtctgtttcctttaaaaatatgtggcaaacaagtgccgagtattatagccaactcgcgccgaatgtcttcgcttgttttcgtcttcattttcctttttcaccagttttaagacggtatacagagcaggaaaatccataaccgtagccgcatttttcatagtgagatgaaagcgattacaaacttgtgattaacgttttatttacttttttgaagtgtgatgtaacgcaatctgttacataacgaattgtctatagttttttcgcgaacatcttttaaccaataataactaccccgacgaggacaaccctatgtggaaacgcttacttatagtctctgcagtcagcgcagccatgagctctatggcgttggccgctccattaaccgttggatttagccaggtcggaagcgaaagtggctggcgtgccgcagaaaccaatgtggcgaaaagtgaagccgaaaagcgcggaatcacgttgaaaattgccgatggtcagcaaaagcaggaaaaccagattaaagcggtacgttccttcgttgcacaaggggtggatgcgatctttatcgctccggtggtcgcgacaggttgggaaccggtattaaaagaggcgaaagatgccgaaatcccggtattcttgctcgatcgttccattgatgtgaaagacaaatctctctatatgaccaccgtcactgccgacaacatcctcgaaggcaagttgattggtgactggctggtaaaagaagtgaatggcaaaccatgcaacgtggtggagctgcagggcaccgttggggccagcgtcgccattgaccgtaagaaaggctttgccgaagccattaagaatgcgccaaatatcaaaatcatccgcagccagagtggtgacttcacccgcagtaaaggcaaagaagtcatggagagctttatcaaagcggaaaacaacggcaaaaacatctgcatggtttacgcccataacgacgacatggtgattggtgcaattcaggcaattaaagaagcgggcctgaaaccgggcaaagatatcctcacgggttccattgacggtgtaccggacatctacaaagcgatgatggatggcgaagcgaacgccagtgttgaactgacgccgaatatggcaggtcccgccttcgacgcgctggagaaatacaaaaaagacggcaccatgcctgaaaagctgacgttaaccaaatccaccctttacctgcctgataccgcaaaagaagaattagagaagaagaaaaatatggggtattgagggttgctatgcctgatgccgattcgtaggccggataaggcgctcgcgccgcatccggcgatggtgcactgaagcctgatgcgacgcttaccgcgtcttatcatgcctactgggagcacgctttacaccgggggaaaccatgacgaccgaccaacaccaggagatcctccgcaccgaaggattaagtaaatttttccccggcgtcaaagcgttagacaacgttgatttcagcctgcgccgtggcgaaatcatggcgctgctcggtgaaaacggggcgggaaaaagtacgctaatcaaagcattaactggtgtataccacgccgatcgcggcaccatctggctggaaggccaggctatcagtccgaaaaataccgcccacgcgcaacaactcggcattggcaccgtctatcaggaagtcaacctgctacccaatatgagcgtcgctgataatctatttataggccgcgaacccaaacgcttcggccttctacgccgcaaagagatggaaaagcgcgccaccgaactgatggcatcttacggtttctccctcgacgtgcgcgaaccgctcaaccgctttagtgtcgcgatgcagcaaatcgtcgctatttgtcgggctatcgatctctctgccaaagtgctgatcctcgatgaacccaccgccagtctcgacacccaggaagtggagttactgtttgacctgatgcgtcagttgcgcgatcgcggcgtcagcctgatttttgtcactcactttctcgatcaggtctatcaggtcagcgatcggatcaccgtcttacgcaacggcagtttcgtaggctgtcgggaaacgtgcgagctaccgcagatcgaactggtaaaaatgatgctggggcgcgagctggatacccacgcgctacagcgtgccgggcgaacattgttgagcgacaaacccgttgccgcgttcaaaaattacggcaaaaaaggaacgatcgcaccgtttgatctcgaagtacgccccggcgagatcgtcggtctggctggattgctgggaagtggacgtaccgaaaccgccgaagtgatcttcggtatcaaacctgctgacagcggcacggcgttgatcaaaggcaaaccgcaaaacctgcgaagcccacatcaggctagcgtactgggcattggcttctgcccggaagacaggaaaaccgatggcatcatcgctgccgccagcgtgcgggaaaatatcatcctcgctctccaggcccagcgcggctggctacgtcccatttcccgcaaagaacagcaagagattgccgaacgctttatccgccagcttggcattcgcacacctagtactgaacaaccgattgaatttctctccggcggcaatcagcaaaaagtgttgcttagtcgttggctactgacccgaccgcaatttctgatcctcgatgagccaacccgcggcattgatgttggtgcccacgccgagatcatccgcctgattgaaacgctatgcgccgatggtctggcgctgctggtgatctcctccgaactggaagagctggtgggctatgccgatcgggtgattatcatgcgcgatcgcaaacaggtggcggagatcccgctggcagagctttccgttccggcgatcatgaacgccattgcggcgtaaggagaacagtgtgatgcctcaatctcttccggacaccactacgccaaaaaggcgctttcgctggccgacggggatgccgcagctggtagcactgttgctggtgctgctggtcgatagcctggtagccccgcatttctggcaggtggtgcttcaggatgggcgtttgttcggtagccccatagacattcttaaccgtgcagctcccgttgcgttactggcgattggcatgacgctggtgatcgccaccggtgggattgatctctccgtaggggcggtgatggctatcgccggagccacaacggctgcgatgacggtcgcgggattcagcctgccgattgttttgttaagcgccctgggcaccggcatcctggcgggattgtggaacggcatactggtagcgatcctcaaaattcagccgtttgtcgccactctgatcctgatggtcgccgggcgcggcgtggcgcaactgatcaccgccgggcagatcgtcacgtttaacagcccggatctcagttggttcggcagtggaagcctgttgttcctgccaacgccggtcattatcgcggtgctgacgcttatcctgttctggctgttgacccgcaaaacggcgctggggatgtttatcgaagccgttggtatcaacattcgggcggcaaaaaatgccggggtaaacacgcgaatcatcgtcatgctcacttatgtgttgagcgggctgtgtgcggcgattgcgggcattatcgtggcggcggatattcgcggtgccgatgccaacaacgctgggttatggctggagctggacgccattctcgcggtggtgattggcggcggaagcctgatgggcgggcgctttaacctgctacttagcgtggtgggggcgctgattattcaggggatgaacaccggaattttgcttagcggctttccgccagagatgaaccaggtggtgaaagcggtggtggtgctttgcgtgctgattgttcagagccaacgctttatcagtctgattaaaggagtacgtagccgtgataaaacgtaatttgccactgatgatcaccatcggcgtctttgtgttgggttatctttactgcctgacccagtttcccggttttgcttccacaagagtgatctgcaatatcctgaccgataatgcctttcttgggatcattgccgttggcatgacctttgtgatcctcagtggtgggatcgatctctccgtcggtagcgtgatcgcctttactggcgtgtttctggcaaaagtgattggcgatttcggcctcagcccgctgctggcgtttccgctagtgctggtgatgggctgtgccttcggcgcatttatggggcttctgatcgacgccctgaagatcccggcatttatcattacgcttgcggggatgttctttttgcgcggcgtcagctatctcgttagcgaagagagcattccgataaaccatcccatttatgacacgctcagtagccttgcgtggaaaatccctggcggcggtcgcttaagtgcgatgggactgctgatgttggcggtggtggttatcggcatattcctcgcgcatcgtacccgttttggtaatcaggtatacgccattggcggcaacgcaacgagcgcgaatctgatggggatttccactcgcagcaccactattcgcatttatatgctctccaccggactggcaacgctggcggggattgtcttcagcatttatacccaggccggatatgcgctggcgggcgtaggtgtggaactggatgctatcgccagtgtggtaattggcggtacgcttttgagcggtggcgttggaacggtattagggacgctttttggcgtggcgattcagggactgattcagacttacataaactttgatggcacgctgagttcctggtggacgaaaatcgccatcggtattttgttgtttatttttatagcattacagcgtggattaacggtgctgtgggagaatcgtcagagtagcccagtgacaagagtcaacattgcgcagcaataaaaacgcctctccgtgtggagaggcgcaggagattacgcgtccgggaactcacggataaagcgttcgacatcttcaaccatatggtcgttgccgacaaagaaactacggcgctggtgcagggtttccgggatgatatccagaatacgctctttgccatcgctcgctttaccgcccgcttgttccgccaggaatgccatcgggttgcactcatacagcaaacgcagtttgccgtccgggtggctggcggtgcttgggtagagataaataccgcctttcagcaggttacggtggaaatccgcgaccagactaccgatataacgactggtataagggcggttggtggatttatcttcttcctggcagaatttaatgtacttcttcaccccgttcggaaacttaatgtagtttccttcgttgatggagtaggttttgcctttctccgggaagcgcatccgttcctggcacaggcagaaaacgccgaggctaggatcgtaagtaaaggcgtgaacaccgcatccggtggtgtaaaccagcatggtagaggagccgtataccacgtaacctgccgcaacctgtttgttaccaggctggaggaaatcttcttccgttaccggcgtgccaacaggcgtaacgcggcggtagatggagaaaatggtaccgacagagacgttaacatcgatgttggagctgccatccagggggtccatcagcaccacgtattttgcgtgttcacagccttcaaagacgacaatctcatcttcttcttcagaggcaatgcccgcaacgatatcgcgtgctttcagtgcggctttcagtttttcattagcgaacaagtcgagtttctgctgaacctcgccctgcacgttctcagcaccgctggcacccaggatatcaaccagtcctgctttgttgatatcgcgatggataatcttggcgcccagttttattgcgctcagcaaagcagtgagctcaccggtagcatgagaaaactcgtgctgcttttcgacaataaattcacctaacgttttcataaaactttccctgcaatgtttatggagtaaagcgaccgcaacaatcttaacaaataatctcaatgttgcgctcaggtgaatcgcgccagcaaattacggattatcctgaaatgcgtttctcacttgcccgacatatgcgtaaaatgagcggcagattaaaaaaggatagtgacgtatgcgcattcatattttaggaatttgtggcacatttatgggcggtctggcgatgctggcgcgccagttaggccatgaagtaacgggtagcgacgccaatgtgtatccgccgatgagcaccttacttgagaagcaaggcattgagctgattcaggggtacgatgccagccagctcgagccgcagccggatctggtgattattggcaacgccatgacccgtggaaatccgtgtgtggaagcggtactggaaaaaaatatcccttatatgagtggtccacagtggctgcacgattttgtgctgcgcgaccgctgggtgctggccgttgccggtacacacggcaaaaccaccaccgcgggaatggcgacctggattctggaacagtgtggttacaaaccgggctttgtaatcggcggtgtgccggggaactttgaggttagcgctcatctgggcgaaagcgacttctttgttatcgaagcggatgagtatgactgcgccttcttcgacaaacgctctaaatttgttcattactgcccgcgtacgctgatcctcaacaaccttgagttcgatcacgccgatatctttgacgacctgaaagcgatccagaaacagttccaccatctggtgcgtatcgttccggggcagggccgtattatctggccggaaaatgacatcaacctgaaacagaccatggcgatgggctgctggagcgagcaggagctggtgggtgagcagggtcactggcaggcgaaaaagctgaccaccgatgcttccgaatgggaagttttgctggatggcgaaaaagtgggcgaagtgaaatggagcctggtaggcgaacataatatgcacaatggcctgatggcgattgcagcggctcgccatgttggtgtagcgccggcagatgccgctaacgcgctgggtagctttattaatgctcgtcgccgtctggagttgcgtggtgaagcgaatggcgtcacggtatatgacgattttgcccatcacccgacggcgattctggcaacgctggcggcgctgcgtggcaaagttggtggtacggcgcgcattattgctgtgctggagccgcgcagcaataccatgaaaatggggatctgcaaagacgatctggcacctagtttaggtcgtgccgatgaagtcttcctgctgcaaccggcgcatattccgtggcaggtggcagaagtggcagaagcctgcgttcagcctgcacactggagtggcgatgtggatacgctggcagatatggtggtgaaaaccgctcagcctggcgaccatattctggtgatgagcaacggcggttttggtgggatccatcagaaactgctggatgggctggcgaagaaggcggaagccgcgcagtaattcggccttagccagatatagtatgcgtaggccggataaggcgttcacgccgcatccggcatttgagcatagtgcctgatgcgacgcttgatgcgtcttatcaggcctacaggtgcaccgtatccggcaaaccatactcacatcaacaacgaaaattacccttcgttctccgctaactcgcgcagatactggaaaatctggcgtgcggatttcggcggcttattcccttctttctctttcttcgcgttgcggatcagagtacgcagttgctgacgatcggcatcgggccacagatttaatacctcagcgatggcgtcatcaccttgatcgatcagacgatcgcgcaggttttccagtttatggaacagcaccacctgctggttgtgacggtttttcagcttatccagcgcctgacgaataggctctacgtcgcgctggcgcagcatcttaccgatgagctgcaactggcggcggcgaccttccatcttaatacgctgggcgagctcaatagccgcgcgcagatccgcatctaacgggatcttatccagcgcgtttttccccagatcaacaatttccgcgccaaggcgttttagctcctcggcatcacgtttaatttcacttttactgacccagataatttcatcgtcttcgtcttcgatgtcatcaccgggaacgtcgtcgagccagtcttcgggctgcttagtcatctcaggctccttaaaaaaagaggctaatgttaccagttaagatgcgcactgaaaaacggttctctgttagacttcagagaaactctctacattatggcacttgcaatgaaagtaatctctcaagttgaagcgcagcgcaagattctggaagaagcagtttccactgcgctggagttggccagtggcaaaagcgacggtgcggaagttgccgtcagcaagaccaccggcattagcgtaagcacgcgttatggtgaagtggagaatgttgaattcaatagcgatggcgcgctggggatcactgtttatcaccagaaccgcaaaggtagcgcaagttccaccgatttaagcccgcaggccattgcccgtactgtacaggcggcgctggatattgcccgttataccagcccagatccctgtgccggcgtggcagacaaagagctgctggcctttgacgcaccagatctcgacttgttccaccctgcggaagtttccccggatgaagccattgaactggcggcccgcgcagaacaggcggcattgcaggcggacaaacgcatcaccaataccgaaggtggcagctttaacagccactacggtgtcaaagtttttggcaacagccacggcatgttgcagggttactgcagtacgcgtcatagcctctccagctgtgtaattgccgaagaaaatggcgatatggagcgtgattacgcctacaccattggtcgtgcgatgagcgatctgcaaacgccagagtgggttggggccgactgtgctcgccgtactttaagccgtctgagtccgcgtaaactctccaccatgaaagcgccagtcatttttgccaatgaagtggcaaccgggctttttgggcatctggtgggggcgatagcgggtggaagcgtttatcgtaaatctaccttcctgctggatagcctgggtaaacaaattctgccggactggctgaccattgaagagcatccgcatctgctgaaagggctggcgagcacgccattcgacagcgaaggtgtgcgcaccgagcgtcgcgatattattaaagatggcatcctgactcagtggctgctgaccagctacagcgcgcggaaactggggctgaaaagcaccggacatgcgggcggtattcacaactggcggattgccggacaaggtctaagcttcgagcagatgctcaaagagatgggcaccgggctggtggtgacggaattgatgggccagggcgtgagtgccattaccggtgattattcccgtggtgcagcgggcttctgggtagagaatggcgaaattcagtatccggtgagcgaaatcaccatcgcaggtaatttaaaagatatgtggcgcaatattgtcaccgtcggtaacgatattgaaacacgcagtaatatacagtgtggttctgtgctgttgccggagatgaaaatcgccggacagtaaaaaaactggcgcgacctgccgcgctataaactaaaaaattacacaaaatcattcgcactgcatcgagacggaaagtgaatgagggccggggagcgtactcgcagtacgtgacccggtcgaatgagcgtagtcgtcgatgaggcagtgtgaaggatgaagtgtaaataaaaaaggaactattcttgcagtctcctcgttggtattcagttcggcgtcatttgctgctgatctcgaagacaatatggaaaccctcaacgacaatttaaaagtggtcgaaaaagccgataacgcggcgcaagtcaaagacgcgttaacgaagatgcgcgccgcagcgctggatgcgcaaaaagcaacgccgccgaagctcgaagataaaagtccggacagcccggaaatgaaagatttccgccacggtttcgacattctggtcggtcagattgacgacgcgctgaagctggcaaatgaaggtaaagtaaaagaagcgcaggctgctgcagagcaactgaaaacgacccgcaatagttatcacaagaagtatcgttaattcctcatttccctgttgcctgcactcaggtaacagggaacttatcatcgcaaatgatgcaccacctgattgctgctgccgcgccagatcagggaagggtcttttaaatcctgcacaaatttgccgtcgaccagcacgttaatcaaatcaacaacctgcatttgcgcagcgttgagttcgtcgagtttatagcctgtccacacccagatgtctttacccggacactcggcgcggatgcgttgtaccagtttcagaatatccggcacgttttgcggatgcagcggatcgccgccggagagggaaataccctggcgtttgatacgagtgtcattcagatcgttaatgatctggtcttccattgctttggtaaatggctgaccggaatttacccgccatgtgcttttgttatagcaaccggggcattcatgaacacacccggagacaaacagggtgcaacgagtgccggggccgttgacgatgtcgacaggatagtactgatgataattcattatttcgcctggcttatcagtccgcgtgtaggctgcatccggtaatcaatgcctgatgcgacgctgtcgcgtcttatcagacctggagcaattgccaaatgtaggccggataaggcgtttacgccgcatccggcatttgcttagctcagagtgaagattaacctatctgcccattccccaaatgtttaacgcggcgcttaacttcttcctgcttaccagcgttaaacggacgtgcatccgggctacctaaatatccgcacacgcggcgagttacgctcacacgggaggcgtcatggttaccacatttcgggcaagtgaagcctttgctggtgcactcgaactcaccggtaaagccacactcgtagcactcatcaatcggtgtattggtgccgtaatacggtacatgctgatagctgtaatcccagacatcttccagcgccttcaggttgtgctgaatgtttggatactcgccgtagcaaatgaaaccaccgttcgccagcggcgggtaaggcgcttcaaagtcgatcttgtcgtacgggttcaccttcttctccacatcgaggtggaaactgttggtgtagtaacctttatcggtcacgcccggcaccacgccaaactcagcagtatcgagacggcagaagcgatcgcacaggttttcactcggcgtgctgtagagactgaaaccataacccgtttcttctttccactgatccactgcctgacgcagacgttcaacaatggcgatacctttcgcgcgaagctgctcgttgtcgtaaacatgctcgccgccgaacagcgcgttaatggtttcgtggatgccgatgtaacccaggctaatagacgcacgaccgtttttgaagatttcagaaacatcatcgtcagcattgagacgcacgccacaagcaccttccatatagaggatcggggccacgcgcgctttcacgccttcgagacgagcgatacgggtcatcagcgccttacgtgccagcaccagacgttcatccagcagcttccagaaggtggcttcatcgccttttgcttccagagcaatacgcggcaggttcaggctgatcacgccgaggttgttacgaccatcgtggatctgctcgccgttttcattttcccacacgccgaggaagctgcggcagcccatcggagttttaaagctaccggtgactttcactacctgatcgtagttcaggatatccggatacatgcgcttgcttgcgcactccagcgccagctgtttgatgtcgtagttcggatcgccttttttatggttcaggccatcgcgaatcgcaaacaccagtttcgggaacaccgcagttttacggtttttaccgaggcctgcgatacggttacgcaggatgctttcctgaatcaggcggctttcccagctggtgcccaggccaaaaccaaaggttacaaacggcgtctgaccgttggcggtgtgcagggtgtttacttcgtactccagactctggaaggcatcgtagcactctttgatggttcgagagttagcgtagccttcggcgtccgggatgttccactcttctgcggtcttgcgatgtttgttgtagctggcagtgacaaacggtgccagcacttcatcgatacggttaatggtggtgccgccataaatatggctggcaacctgagcaataatctgcgcagttaccgcggttgccgtagagatgctcttcggcggttcaatctcggcgttccccattttaaagccctgggtcagcatgcctttcaggtcgatcaacatgcagttgaacatcgggaagaacggactgtaatcgagatcgtgatagtgaatatcgccacgctcatgtgcctgcaccacgtcacgcggcagcaggtgctgacgtgcatagtgtttagccacgatcccggccagcaggtcgcgctgggttggaatcaccttgctgtctttgttggcgttttcgttgagtaagctggcgttggtctgctcgaccagaccacggatctcctggttcaggcgaccgcgtttttcacgttcaatgtcgcgatcgtgacggtactcgatgtaagcacgagccagttgtttgtatggaccactcatcagctgattttcaactgcggtctggatctcattgatatccacctggttgcggccctgcatctgctcgctgacaaccgcggcaacagtggcgcaataatcggcatcatcgacttccgctgctttagctgcacgcagaatcgcttctttgatgcgctcacttttaaacggcactttgcagccgtctcgtttcatcacatgcggtgtcatgatcgctccatatttttaagaacaggttatccacagaaattgggaaaggcgttttccggttttttcgtttcgttttccggtgctttccgcaatcgccatccgcttatccacaacgccgcacctttttcgtggggagctgtagtagcaattatagtcgattaatacaacatattgggttgggacgcattttaaagtctatatatagtgctttgcatcaaggatgtttgagctttttttgatgtagctcaaagtaaaaagcagagcgtacggatgacgggcgctacagcgatatgtaaattttttaatgaatttgctggttgaaaaatcaacaaaaacaacatactgacagacaaaaccccggaatgaccggcattaccggggcttagggaagatttacttctgtaaccaccagacagcctcaaaaggccgtaaattcatggcacagggttgtggactggcttcttcgtagttatgcatcacaagctgccagttgccgcgcatttgccctgcctgccagggttggatctcacggctaaggttggcaatgaccagcaaggtttgccccttccattcacggcgatagcaccacaatacagggctgtttggcagcagatcctggtaattgccccatgtcaggatggcttcctgcttacgcagtgcgattaacttttggtaggtgtaaaacacgctggaatcatcggccagcgcggcttctacgttgatttgttgatagttatcgcccaggccaatccacggttcgccagccgtaaacccggcattatcgccgttgctccattgcatgggcgtgcgactgttgtcacgggatttactggcgaggattgccaataactcgtcggcatcacgcccatcgttgcgcagctcggcaaacatattgaggctctctacgtcgcgatagtcagtaatgcgcgtgaaatgcgggttggtcatgccaatctcttcgccctggtagatatacggcgttccctgcatgccatgcagcaccatcgccagcatttttgccgcaggcacgcggtattcaccttcatcaccaaagcgagaaacaatgcgcggctgatcgtggttacaccagaacaaggcattccatgctacgttgtgcattccttgttgccagtggcggaacaatgttttcaacgccacaaagtcaggtttagccagcgtccatttttcaccaccgggataatcgaccttcaggtgatgaaaattaaaggtcatgctcaattcactgcctgtcagagccgcgtatcgctggcaatgctcaaggctggtggaggacatttcacctacggtcattaacccgcgtggcgtaaacacatcgcggttcatctcgtgcaaaaactcgtgtgctcgtggcccgtcggtgtagaagcgacgcccgtcgccgtccaggtcttcagggaaacgcgggtctttggagatcagattcaccacatccaggcgcaacccgtcgaccccacgatcggcccagaactcacagacttttttcagctctgcgcgtaccgctggattctcccagttgagatccgcctgttctggtgcaaagagatgcaaatagtactgttcgctttccgcatgccagcgccacgcactaccgccaaatttactacgccagttgttcggtggcgtttctggttctccatcgcgccagatataaaactggcggtaagggctttctttgttcagcgcctcgcgaaaccaggcatgttgggtagaggtatggttaaacaccatatcgagaatgatacgaatcccgcggctttttgcctgcgtcaccagttcgtcaaaatcgtccagcgtgccgtaggtgggatcaatcgccgtatagttcgctacgtcgtaaccgttatcgacctggggagagacataaaagggggttagccagatggcatcaacgcccagtttatgcagatagtccaggtgttggataacgccacgtaaatcgccggtaccgctacccgtggtgtcctgaaaactctttggataaatctggtagataacgccgttttgccaccagtggggaagatgagtcattacgttattcctgcgaatgcgagggggcgcaattgcgccccgaagaaaattaaacaatgtccagcgtgcccaggcggtatttccgctgatagataaagctggtgagtacaatcgggatgatgatggcgatagccattgccagcgcaaacacctgccagtagctcggttgaatgctgagaattcccggcaggccgcctacgccgatgccattcgccataacgccgttcaggccgcatagcaatcctgccagaccagaaccaatcatcgcgcacagcatcgggaagcgatatttcaggttgatgccgtacattgcaggctcagtgaccccaagccaggcggagatagcggcaggcacggagatctcgcgttcattgtgcttgcggctggaaatgataatgcctatcacggcggagccctgagcgatattgctcagcgcaatcagcggccacactggcgtaccacccatgctttgaatcatctgcaaatcaatagcaagcgtggtctggtgtacaccggtgatcaccagcggggcgtacaggaagccaaacaatgctgcgccaatcggagcaaagctgccggtcatcaggtgacgtaccgcaaaggcaacgccatcgccaatcatgcgaccaaacggaccaatcagcgcatgggcgaggaacaccgcgaggatcaggctacagacgggtaccaccaccagatagaggtaatccggcacgatgcgtttaaggcgagtttcaataacgcccagcgccagtccggctaacagtgccgggatcacctgcgcctgatagcctactttggcgatgctgaacatgccaaagtcccacacttccggcagctgctgcccgagcagataagcgttcatcagctgtggagaaaccagtgtcacgccaagcacgataccaaggatcggcgtgccgcccatttttttcaccgcactccagcaaataccgaccggcaggtagaagaagatcgcttcaccgatcaaccacagaaaatcgtagatcgtttgcagggaagggtacatttgcgccagcgtctgaccgttgctcatgggcaaatcgccgatcacattgcgaaaaccgaggatcaaaccgccgctaatcaacgcgggcagcaacgggaagaagatcaccgcgaaatgagagatcaactgctcatgccatttcatattatgccgggcggctttttttacctgctctttatcaacctgcgcctgtccggtactcgcaatcagtgcttgatagtaatcacccacgttggtgccaatcaccacctgaaattgcccggcattggtgaaacagcctttcaccatagggagttgctcaatttctttcggtctggcattggccggttggttgaggacaaagcgtaggcgagtaatacagtggctcaccgtcgcaatattgccgcgcccgccgaccagttcaatcaaccgatcgatatccgtttggtttattttgctcatcataaagccccatggcagatgacatttttggttggctgcagaatatattgcgcggaaaaatttaaaaacgggaacgttcccgaaacgcagcgaagatcacaatttatcgttcaggaaacgatcaggacagggtggcggggatgatgatttgttgcggttcgctgcgcccggttacctgcgcgatcaactggcaagccgcctggcgtccagcttcggcgtaaccgggatctacggttacgatctccggatggaggaatttcattaacggcgtattaccgacgctcgccagttgcaaggtgtcgatgcgttgctcttgcaggtatttacttgcgccaagtgccagcgtgtcggttgcgcacagtaaggcggtagtttcaggcgtaatcacttttgcaacgttctcatagccttgcttcatagcaagccctagcagggcggcaacgggatgcagtttatgcgctttgcagaacgccaggtaggcttcgtgacgtcgcttaccggttgtcacgtcactgtgcggcacgccgagataactgatattacgatgcccctggtcatacagccgttgcatcaggattttgattgccccttcgtcgtcataacagacgctagcaaagccttttgcgtcacgcgccagcagaaccaggctactctgccagtgggctaacatttcttctgttatgccagtaaaaccgaacagcactacgccgtcgatattacgccgtttcagcactcccaaatgttcggcaactaattgcggggaaaactgactttccatcatgattgggtcgtaaccttgttcatagaacgctggcagcatggtttgaacggcgagattttcactcaagctatccagacgggtaacaatgatggcgaccactttatcgctttgcccacgcatagcgcgcgcagagcgggaaggggaaaatccatgctgattcatcactgcttcaacacgctcgcgggtgagctggctcacgccgctttcgttattcagcacccgggaaactgtagatttccccacgccgcttaagcgcgcgatatctttgatggtcagccgattttgcatcctgttgtcctgtaacgtgttgtttaattatttgagcctaacgttacccgtgcattcagcaatgggtaaagtctggtttatcgttggtttagttgtcagcaggtattatatcgccatagatgctacgaatattattggattctccttattatttgcggcgcttttttcacttaccggaggttatatggaacctgatcccacgcctctccctcgacggagattaaaacttttccggtaagcccgtcttttcacggcgttaccggatgcgtaaggccgtgacgttttaacgtccctgctcagctttattaccttcaggtaaggcttcgccacgcctgaagacatttctgtactgtttcagacagtgcggagggactccttatgtttaaagaaatttttacccggctcattcgccatttaccttcccgtctggttcatcgtgatccattgcctggcgcgcagcagacagtgaatacggtggtcccgccgtccttaagtgcgcattgcctgaaaatggcggtgatgcccgaagaagaattgtggaaaacgttcgacacccatccggaagggttaaatcaggcggaagtggaatctgcccgcgaacaacatggtgaaaataaattacccgcacaacaaccgagcccgtggtgggtacatttatgggtctgctatcgcaacccctttaatattttactcaccattctcggcgctatttcttacgccacggaagatttatttgctgcgggcgttatcgcgctaatggtcgctatttctacgttgctgaactttattcaggaagcacgttccactaaagcggcagatgccctgaaagcgatggtcagcaatactgcgacggtgctgcgcgtaattaacgacaaaggcgaaaatggctggctggagatcccgatcgaccagctggtgcccggcgatattataaaactggcggcgggagatatgatcccggcagatttacgtatcttgcaggcgcgggatctgttcgtcgctcaggcgagcttaaccggtgagtctctgcccgtagaaaaagccgctaccactcgccagccggagcacagcaatccgctggagtgcgacacgctgtgttttatgggcaccaccgtggtgagcggcacggcacaagcaatggtgattgctacaggtgccaatacctggtttggtcaactggcggggcgtgttagtgagcaggaaagcgagccgaatgcctttcagcaagggatcagccgcgtcagtatgctgctgattcgctttatgctggtgatggcaccggtggtgctgttaatcaatggttacaccaaaggcgactggtgggaagcggcgctgtttgcgcttagcgtcgcggtaggcctaacgccggaaatgttgccgatgattgttaccagcacgctggcgcgcggcgcagtaaagctgagcaaacagaaagtgatcgtcaaacatctggatgctattcagaactttggcgcaatggatattctgtgcactgataaaaccggcaccctgacgcaggataaaattgtgctggagaatcataccgatatctccggtaaaaccagcgaacgcgtgctgcatagcgcgtggttgaacagtcattatcagaccggacttaaaaacctgctcgatacagcggtgctcgaaggtacggatgaagagagtgcgcgcagcctggccagtcgttggcaaaaaattgatgagattccgtttgatttcgagcgtcgccggatgagcgtggtagtggcagaaaataccgagcaccatcagctggtttgcaaaggtgcattgcaggaaatcctcaatgtgtgtagccaggtgcgtcacaatggcgagattgtgccgctcgatgacatcatgctgcgtaagattaagcgggttactgatacgctgaatcgtcaggggctgcgcgtggttgcggtggcgacgaaatacctgccagcgcgtgaaggagattaccagcgggcggatgaatccgacctgatcctcgaaggatatattgcttttcttgatccgccaaaagagacaaccgctccggcactgaaggcattaaaagcgagtggaattaccgtaaaaatccttactggcgacagtgagttagttgcagcgaaagtgtgccatgaagtggggctggacgcgggagaggtggtcattggtagtgatattgaaacgctatctgacgacgaactggcaaatcttgcacagcgtaccacgctgtttgcccgcctgacgccgatgcataaagaacgcattgtgaccttactgaagcgcgaagggcatgtggttggctttatgggcgatggtattaatgatgcgcccgccttacgcgctgcggatatcggcatttctgtggacggcgcggtagatattgcccgtgaagcggctgatatcatcctgctggaaaaaagcctgatggtgctggaagagggggttattgagggacgtcgcactttcgccaacatgctgaaatacatcaaaatgacggcgagctctaacttcggtaatgtgttcagcgtgctggtagcgagtgctttcttgcccttcctgccgatgttgccgttacacttgcttattcagaacctgctgtacgatgtgagtcaggtggcgatcccgtttgataacgtcgacgacgagcaaattcaaaagccgcagcgttggaatccggcggatctggggcgctttatgatcttcttcggaccgatcagcagcatcttcgatattttgacgttttgcctgatgtggtgggtattccatgccaacacgccggaaacgcaaacgctgttccagagcggatggtttgtggtgggcttactgagccaaacgctgattgtgcatatgatccgcacccgccgtgtgccgtttattcagagctgtgcaagctggccgttaatgatcatgaccgtgatcgtgatgattgtcgggatcgcattgccgtttagtccgctggccagttatctgcaattacaggcgctgccgttaagctatttcccgtggctggttgcgattctggcagggtatatgacattaacccagttggtgaaagggttctatagccgtcgttacggctggcaataaagaataaactgggcacgatagccccgattcagattgtagacaaagtgagttttgttcatgccggatgcggcgtaaatgccttatccggccaacaaattcaataaattgcaggaatcacgtaggcctgataagcgtagcgcatcaggcgattttgcgtttgtcatcagacttaatccgggcatgatagcccggatttccatcaagattagcgacgaacagcgatcgcttcgatctcaatcttcacgtctttcggcagacgggcaacttcaacgcaagaacgtgccgggaaggtggcgttgtgttcggtgaagaaggcttcgtaagtggcgtttacggttgcgaagtcgttcagatcttttacaaacacggtagttttaacgatgtcgcccactttcaggccagcggcttcgacgatcgcttttacgttatccaggctctgacgtgcctgtgcagcgacgtctgccggtacttcgcccgttttcggatttaccgggatctgaccggaggtgatgatcatattgcccagatcaacgccctgtacgtaaggaccgatagctgccggtgcattttccgtcgcgatagttttgctcatgatttctcctttattacagcggtaaaaagtctggctcattatagggagccagacttttattaccaaccgcaattaattggccagcaccacattatgggaaaactctttttcacagtatttgcatttgagcgcgatatcattggcgcgttttcgcacggcaaagctggaactaaccggttcggcatggctgatacagttgctgttcgggcagaccagcacattgtcgatgcgctccggcagacttgggcggcttttacccaccacttcatagttgtcgatacggttaaccgtggcttgcggcgcatacaatgccagttgatctacttgatcttcactcaaaaaggtattttcgattttgatcagatctttgcggcccatctcgccagaaggcaggttcagaccaatggtgatgcgctgatccgtttcggtcagcttgaacagactcaacagcttaaaaccgatctgggcggggatatggtcaattaccgtgccgcgtttaatagcttcaacctgcaatttattatcgtgtgtcatctctatttccccttacagtaccagatcgcgattcagaaccagtgccagtaacgcctggcgagcgaaaatcccgttgcctgcctgctggaagtaccaggcgtgtggcgttttatcaacatccgtcgcaatctcatcaacacgcggcagcggatgcagcactttcatattggctttggcgttgtggagatcgctggcgcgaagaacaaactgcgctttcacgttggcgtactcggacgggtccagacgctctttttgcacgcgggtcatgtacaggatgtctacttccgccatcacttcttcaatagagctgtgcagactccatgcgatccctttttcatcgagcatatccagaatgtattgcggcattgccagcgcgtccggcgcgatgaagtaaaaacggttgccgtcgaacttcgctaacgcctgagtcagggagtgaacggtgcggccatatttcaggtcaccaaccattgcgacgtggagattgtccagacgcccctgggtttcctgaatagtgaataagtccagcaaggtttgcgtcggatgttggttggagccatcaccggcattcagtaccggtacattgccggaaaactcggtggccaggcgcgccgcaccttcctgcggatgacgcatcactatcgcatcgacgtaagtgctgataacgctaatggtatcggccagcgtttcgccctttttacccagacttgtattggcgctgtcggagaagcccaccacgctggcccccaggcggtgcatagatgtttcgaaagagaggcgggtacgggtagaggcttcgaagaaacagctggcaatgactttgtgcttcaacagctctggttgcgggtttgctttcagtttcgccgctgtcgccagcaccagattaaggtcatcgcgactaaggtcgtttatggaaatgatatgtttctgatatagcggattagccatcttttatctcctgacgcctgggcaaaaaaaagcccctcgattgaggggctgggaatgggtgatcaacgggaagaaaaacggcaggccagcgtcttttttcagacgcggtaagacaaaatgtcgaacacactgaaccatacatcctcccggcaaattgtccggcattatactcatcgtcagaagcggcgcaagcatttgatgcaatattttgtcagcgcaaacggtttatttgaattaaaagtcaaggtatatgcatttttatttgatgtgattctgcaggggaactgtccttcggtatcaataattgcagacattccctgctttttcctttttcactttcacgcaatcagatatgcattttattccattcatccgacttatagggcggagtgtgaaagcgaacggctaacactattgcttactgctcagggatgcgcgctatcactttaatttcaaaatcaaagcctgccagccatgtaacacccaccgccgtccagtttggataaggtggggcgctaaatatttcatttttcaccgtcatgatgtcttcaaattggttttctggatcggtatggaagctcgtaacatcaatgatatcgtcaaaagtgcatcccgcagctgccagggtcgcatgcaaattatcaaatgccagtctgacttgttgctgaaaatcgggttctggtgttccgtcctctcgacttcctacttgcccggaaacaaacagcaaatcgccggaacgaatagccgcagaataacgatgctcagcatatagactatgtcggccagcagggaaaacagcggttctttctaccatttggttatcctcaagatttacgacatgaacagaagatttctctttaccgggagccgcttttagcggacgacgtgagtaaacaaaacccagacatcatggataatggctgggcttaattgagcgtagtcggttatgcgccaaacgcgccatcaatggtatgcatcgcgccggtaacaaaactggcttctggccctgctaaccatgcgaccataccagcgacctcttccggttgcccatgtcttttgatagccatcaaactatgcaacatatcgcgcattggcccgttggcgggattagcgtcggtatcaattggccctggctggacgacgttaatggtgatcccacgcggtccaaaatcacgggccagcccgcgcgccatgccttgcagggcagatttgctggcggcataagcagccatgcctgcaacaggcatacgatcgccattcacggagccgatgattaagatgcgcccgccttcgggcatctgccgggcggcttcaacagaggcatgataaggagcatgaatattgattttgaaaaggcgatcaatatcgtcggcatttaattccagggcctcgccaaagacgccaatacctgcatttaccaccaggatatccaatgcgccgctcttacgaacgacatcaatgacagcgtctctgtcagcactatctgtgaatactgctgtcgctccagtctcttgtgccaggcgtttagcggcatctttgctccccgcataggtgaatcgtacattggccccatcggtgacgaaacgacgtacgatagcggcaccgataccacgactgccaccgaggatgagaactgtcttacctgtaaaagcgcccataaggactccttgatttattatgtaacatgcattacaaaactgttttaactttctgtcaacaggttttgtaatggtcactaaaaaacaatctcgcgttccaggtcgtcccagacgtttcgctcctgagcaggcaatctctgcggcaaaagtgctttttcaccaaaaaggtttcgatgctgtcagtgttgctgaagttactgattatcttggtattaaccccccgagcctctacgcggcttttggcagtaaagctgggttatttagccgtgtactcaatgaatacgtcggtacggaagctattccgcttgccgatattcttcgtgatgatcgtccggtaggcgagtgcctggttgaggtattaaaagaagcggcgcgcagatatagccaaaacggcggctgcgctggctgtatggttcttgaaggtattcatagtcatgatccacaagcgcgtgatattgccgttcaatattatcacgccgcagaaacgaccatttatgactacatcgccaggcggcatccacaacgcgcacaatgtgtgactgattttatgagtaccgtgatgtctgggctttctgcgaaggcacgagaggggcactctatagaacaactctgtgcaacagctgcaatggcgggggaagcgataaaaactattcttgaggagtgatgcgggccttgacccgaaaggcgggaaagcgcctgccgataagttgtgataagacaataattcacgcgttaaggctagcggaattgattatcttttcgtataacgatagaaatgaaacgttgttttaattaaggagtggaaaagatgatcatcggaaatattcataatcttcagccgtggctaccccaggagttacgccaggcgattgagcatatcaaagcacacgttacggcagaaacgccaaagggcaagcacgatatcgaaggcaatcgactgttttatcttatcagcgaagatatgaccgagccgtacgaagctcgccgtgcggagtaccatgcccgctatcttgacattcagattgtgttaaaaggtcaggaaggcatgaccttcagcacgcaacctgcaggcgcgccggataccgactggttagctgataaagacatcgcatttttgccggaaggcgttgatgagaaaacagttattctaaatgaaggtgattttgttgtgttttatccgggggaagtgcataaaccgctgtgcgcagtgggcgcgccagcccaggttcgcaaagcagtagtgaagatgctgatggcgtgatgacttttcgccgtaaataactcaaggtttacggcgagtttgtgaaaagagcgttttttgatatttttttgtgagtaaaatttgtaatgcttagacgttcttattcactcaaggagttcgtcatgagcaaaataagtgatttaaattattctcaacacattacattagccgacaattttaaacaaaaaagtgaagttttaaatacctggcgtgttggaatgaatgattttgcccgtattgccggggggcaggataacagaaggaatattctttctcctggagcatttttagagtttttggcaaagatatttaccctgggttatgtggattttagcaaacgctccaacgaagcgggtagaaatatgatggctcatattaagtccagttcttattctaaagatactaatggcaatgaaaaaatgaagttttacatgaataatcctgtaggggaacgagcggatagtcccaaggtgattatagaaattagtctttccactatcactactatggggactcgtcaaggacatacagccattatatttccacaacctgatggtagcactaaccgttatgaagggaagtcctttgaaagaaaagatgagagtagtttacacctgattactaacaaggttctggcgtgttaccaaagtgaagctaacaagaaaatagcgcgtctattaaataataatcaggagttaaataatctacagaaattaaataatctacagaagttaaataatctactgaagttaaataatatacaggggttaaataatcctcaggagttaaataatccgcagaatttaaatgattctcaggagttaaataacagccaggaattaaatagtccacaggagttaaatgatccgcaggagttaaataattctcaggacttaaataactctaaggtgagttgtacagttagtgttgattctacgattacgggtttattaaaagaaccattgaataatgcattattagcaataaggaacgaacatctgctattaatgcctcatgtatgtgatgaaagcattagttacttactgggcgaaaaaggtatacttgaagaaatagataagctctacgcattaaatgatcacggaattgataatgacaaagtaggtaacaatgaaattaatgacatcaaagttaacctgtctcatattcttattgattccttagatgatgcaaaggttaaccttacaccggtcatcgatagcattctggagacttttagtaaatccccatatattaatgatgtaagaatactggattggtgttttaataaaagcatgcaatattttgatgatactaaaaagataaagcatgcatgctccgtaataaatcatattaatcttcgcagcgatcagtctaaaatagctgagacattatttttcaatctcgataaagaaccctataaaaatagccctgaattacaggggttgatttggaataagttggttgtatatgtcaatgaatttaacttaagtaatcgagaaaaaacaaatttaatacaaaggctatttgataatgttgagtctatatttaatgaagtacctgtcagcattttagtgaatgatatttttatgaatgatttctttatgaaaaatcctgagatgattaattggtacttccctcagttacttaagagttatgagggtgaaaagatttattttgataatttaaaatatgatttaaatgataatgataaggaatctaataaagaaattttgaagaatcaaccagataatgttatcaaagaaaaactgaataatgaatacaaacttagatttagaatgatgcaaactatcttgcaaagcagagttaatgtattaccatatattaatgaacagcgtttaaataaactaaatccaccggaaaatttacgtatagcaatagaacactttgggtggaagaatagacctatcactgcataaaataatgtgatgccgggatggtttgtatttcccggcatctttatagcgatagcaattatttactgagcgtcgcgaccatcaccgctttgatagtatgcatacggttttccgcctgatcaaaaacaatgctggcggcagattcgaagacctcatcagtgacttccataccgccatgtaggccaaattcttccgccattttcttgccaagcgtcgtttggtcgtcatgaaacgcgggcaggcagtggaggaatttgacctccgggttaccggtcaactgcatcatcttgctgttcacctgatattcacgcagcaatgcaatccgttccgcccatttctcttttgcttcccccatgctcacccacacatcggtatagataaagtcagcaccttcaactcccttcgcgacatcttcagtcagcgtaatattcccaccattttgctgtgccagggcgcggcattccgtaaccagcgcagcttccggccagcacgcttgtggcgcgaccagacgcaaatccagaccggtaagcgccgcagcttcgagcatgctattgcccatgttgttacgcgcgtcacctgcatagaccagcgtcatttcgttgaacgctttgccgggcaaatgctcctgcatggtgagaagatccgccagcagctgcgtgggatggaactcattggtcaggccattccataccggcacgctagcgtattccgccagtgtttcgacaatctcctgaccatagccgcgatactgaataccgtcatacatgcgaccaagcacgcgggcagtgtctttaatgctctctttatgaccaatctggctgccgcttgggccgagataagtaacgcgagcaccctggtcatatgcggcaacttcgaaagagcatcgggtacgagtgctgtctttttcgaagatgagcgcgatgtttttaccagtgagtttggcttcttctttaccgcttttcttatcggctttcagcttcgcggctaactgcagcaggctgttgagttcagctggcgtgaaatcgagtaatttcaggaaatgcttatgataaaacccggacatagatccctcctgtggctaacgcctcaatgaattaaaattcaatttatatggatgattattcatttgcaagtctaaagcataaatctttgtcacaaaggtggaggcaatgtcagtggtgtgtgacaataagagtatcggcaggacattaagaggaatgagccatggcaaacccggaacaactggaagaacagcgtgaagaaacacgtttgattattgaagaattactggaagatggcagcgatccggacgcgctgtacaccatcgaacaccatctttccgcagacgatctggaaaccctggaaaaagcagcagttgaagcgtttaaactcggttacgaagtgaccgatccagaagagctggaagttgaagatggtgatatcgtgatttgctgcgacatcctcagcgagtgcgcgttgaatgccgatctgatcgatgcccaggttgaacaactgatgacgctggcagagaaatttgacgttgagtacgacggatggggcacttactttgaagatcctaacggcgaagatggcgacgatgaagattttgtcgatgaagacgatgacggagttcgccactaattaagcgtagcgcatcaggcccaggtagttcctgcaacctggtgaatttgtagcccggataaggcattcatgtcacatccggcataaacaaaacgtacgttgttaatgttcgaatgcccgcgagttgaacacgcgggcatttttttagagttcgcgcaacatccgcacttcacaatcgacatggcccgtgcagccaagcgcatagtcgatatgctcaaagcccaaatgctcataaagcgcaatggcttcctttaaaaaagcggtcgtttccagatagcagcgtttgaaacccatctctcgcgcctgctccatcgccattaaggccagtttttttgccagccctttgccgcggatagccggaagaaaatacatcttttgcagttcgcaaatatcgctctcactcccggttaatggcgctatcccaccgccgccgaccacttcaccctcgtactcaacgacccaatatgcatggccaggctgactatatacttgatacagctcgtcaagattcggatcggcgacggtgtagcctttatcagcggtaagaccgtattcggcggatacctgacgaatgacgcgggcgatagcaggattatcctgcagcgtcaggcgacgcattacaggactttgcggcgcaatgttattcatagtttaacccaataaaaataaagtaattatacatttgtttaataccactctcttcttacgtacgcaagcgacttataaagtaataaagtttttgccagcctattactgataagagtattgtaacgtggcagaacattttactgtctgtatatataagttatatcaatggattttttaattcagggaatttttatggctcaagttattaatgaaatggatgttccgtcccatagctttgtttttcatggtacaggtgagaggtattttcttatttgtgtggtgaatgtgttgttaacgattataacgctaggtatctatttaccatgggcattaatgaaatgtaagcgttatctttatgctaatatggaagttaacggacaacgattttcttatggaattaccggtgggaatgtttttgttagttgtcttttttttgtttttttctatttcgcaatcttaatgacagtgagtgcagatatgccgcttgttggttgtgttttgactttgttactgttggttttgcttatatttatggcagcaaaaggactgcgtcatcaggccttaatgaccagtctcaacggcgtaagatttagttttaattgctctatgaaagggttctggtgggtgacctttttcttgccgattttaatggccattgggatggggactgttttctttatcagcacaaagatgctacctgccaatagtagtagtagtgttattatatccatggttctgatggcaatagttggtattgtttccattggtatttttaatggtactttatatagtctggtaatgagttttctctggagtaataccagtttcggtatacatcgtttcaaggtgaaattagatactacgtattgtataaaatatgccattctcgcatttttagctttattgccttttctcgctgttgctggttatattatcttcgatcaaatattaaatgcgtatgatagttctgtatatgcaaatgatgacattgagaatttacagcaatttatggaaatgcaacgtaaaatgataatcgcgcagttaatctattattttgggattgctgttagcacaagttatttaacggtgtctttgcgaaaccattttatgagcaacctgagtctgaatgatgggcgtattcgttttcgcttaactttaacgtaccacggtatgctttatcgcatgtgtgcgttggtggtgatatccgggattacgggcggtctggcttatccactgctgaaaatatggatgattgactggcaggcaaaaaatacgtatttgctgggcgatttggatgaccttcctttaatcaataaagaagaacaaccagataaaggcttcttagccagtattagtcggggagttatgccttctttaccatttctgtaagagataaaaaaggccggagcatgctccggccttcgttttcatcactgtgttttgattacagcgcggcgataacagcctgctgttcaatcagtttcgctttcgcttccgcatagccttccagcttctcacgctctttcgcgatgaccgcttccggtgcgcgggcgacaaagccttcgttcgccagtttgttctcgatacggctgatttcaccttcaatcttcgccacttctttcgccagacgcgccagctcatcttctttgttgatgaggccagccatcgggatcagcagctctgcaccgtcgatgatcttcgtaacggaaaccggacctttgtcatcggcaggcagcacggtgatactttccagacgcgccagggtttgcaggaagccacggttttcatttacgcgacgttctgcatccgcgctgcaaccacgcagcagcagctccagcggtttgcccggcgcgatgttcatttctgcacggatgttacgtaccgcaacgatcgcctgtttcagccattcggtgtcggccagtgcggcttcatcaacctgagatgcatcgtactgcgggaacggctgcagcatgatggtgtcggcagtgataccgcaaagtactttcacacgctgccagatggtttcggtgatgaacggaatgatcggatgcgcgaggcgcagcagaccttccagtacagtcaccagcgtatggcgagtaccgcgcagttctgcttcggtgccaccgttcattaccggcttggtcagctcgagataccagtcacagaactggttccaggtgaactcatacagaatgcctgcggcgatatcgaagcggaagctgtccagcgcttcgcggtacgctttgatggtctggttgaactccgccagaatccagcggtccgccaggctcagcgtcatttcgccgccgttgaagccgcaatcctgaccttctgtgttcatcagcacaaagcggctggcgttccacagcttgttacagaagttacggtaaccttccagacgcttcatatcccagttgatgtcacgaccggtagacgccagcgccgccagggtgaagcgcagcgcgtcagtaccgtgcggctcaataccgttcgggaactgcttctcggtgcgcttacggattttgtccgccagctgcggctgcatcatattgccggtacgtttttccagcagttctggcaggctaataccgtcaaccatatccagtgggtcgataacgttacccttggatttggacatcttctggccttcgtcatcacgaatcaggccggtcatgtaaacggtgtggaacggcacctgcggtttgccattttcatctttgatgaagtgcatggtcatcatgatcatgcgggcaatccagaagaaaatgatgtcgaaaccagataccatcacgctggttgggtggaactgacgcagggcgtcggtattttccggccagccaagggtagagaaggtccacagcgcagaagagaaccaggtatcgagaacgtcttcgtcctgacgcaggacaacatcagcaccgaggttattttctttacgcacttcgtcttcgttgcggccaacataaacgttacccgcttcgtcataccatgccgggatacggtgaccccaccacaactgacgagagatacaccagtcctgaatatcgcgcatccaggagaagtacatgttttcgtactgcttcggtacgaactgaatgtcgccgttctcaaccgcttcaaccgccggtttcgccaggacatcggcacgcacgtaccactggtcggtcagcattggttcgataactacgccgccacggtcgccgtaaggaacggtcaggtcgtgcggtttaatttcttccagcaggccaagcgcgtcaactgcggcaacgactgctttacgtgcagcaaaacgctccagtttctggaactctgcagggatttcgctggaataaacgtcagattcgttacctttggtatcgaacacctgggcgctttcacggatatcgccgtcaaaggtcaggatgttgatcatcggcagggcgtgacgtttacccacttcatagtcgttaaagtcgtgcgccggagtgattttcacgcagccggtgcctttttccatgtcggcgtgttcgtcgccaacgatcggaatacgacggttaaccagcggcagaatgacatatttgccaatcagatctttgtaacgcggatcttccgggttaacggctacgccagtatcgcccagcagggtttctggacgggtagtcgcgaccaccagataatctttaccgtctgcggttttcgcaccgtcagccagcggatagcggatgtgccacatgctacctttgctttcgcggttttcgacttccaggtcagagatagcggtgcgcagtttcggatcccagtttaccaggcgtttgccacggtaaatcaggtcttctttatacagacgaacgaaaacttctttcaccgcattggacaggccttcgtccatggtgaagcgttcacgctcccagtcgacggagttgccgagacggcgcatctgacgggtaatggtgccgccagattccgctttccattcccagattttgtcgatgaaagcttcgcggccgtagtcgtgacgggttttaccttcttctgcggcaatcttgcgctcaacgaccatctgggtagcgatcccggcgtggtcagtaccgacctgccacagggtgtttttgccctgcatgcgctgatagcggatcatggtatccatgatggtttgctggaaggcgtgacccatatgcaaactgccggtgacgttcggcggcgggatcatgatgcagaaactttcctggctttcatcgccattaggcttaaagtagccctgcttttcccagtgctcgtaaagcggctgttcgatatcttgtgggttatatgtcttttccattatttccaggttgccgtattcaggttgaaaccagccacgcggtaggctttatagcgttcgcgcgccagttgtttcagagaatcttcataaggaacgaagtctaccacttctgtgaaagcggtggcaaaatctgcaaagcttgttcgcagactaatcaatatatcgcgccggctgctgctacgcttttgcggccaggcgatctccaccggtgcaccgccgcgcggtccttctcccgctaaattatgcggaacaaagctttctgccggacgcgcccacagggcttcatccagccggtaagcctgcttttcatcttcacaggcgatgagcacgcgcttaccgctgcgccaacgttctgcggcaatttcacacaccagttgctcaacggcgcttaagccatcgacggtggtgtcattgtccagaaggtagaacgtcgcgtttttcataaatggggcttcttgtggtggatttaaatacgcatcaggtatacaccgcagcgcctgatgcgacgctgttgtgtcttatcaggcctacgagttcagtgctgtgtaggtcggataaggcgttcacgccgcatccggcaataacagccttgcctgacgcaattactcttcgccgttaaacccagcgcggtttaacaggaactgtgccagcaacgctaccggacgaccggtggcgccttttgctttaccagaacgccaggcggtaccggcgatatccaggtgcgcccagttgtacttacgggtaaagcgactcaggaagcaacctgcggtaatcgccccaccaggacgaccgccaatgttcgccatatcggcaaaattggactccagttgttcctgatactcgtcacccagcggtaagcgccatgcgcggtcaccggattgttcagacgcggcaatcagttcatgggccagcggattatggttcgccatcagaccagtaatatgatgacccagcgcgatcacgcaggcaccggtcagcgtcgccacgtcaatcaccgcttccggctcaaaacgctcaacgtaagttaacacgtcgcacagtaccaggcggccttcagcgtcggtgttcagcacttcaacggtttgaccggacatggtggttaacacatcgcccggacgataggctcgtccgccaggcatgttttcgcagcctgccaacacgccgataacgttaatcggcagttgtagctccgcgaccatccgcatcacgccgtaaaccgctgccgcaccgcacatatcgtacttcatctcatccatgccttcactaggcttgatgctgataccgccggagtcgaaggttaaacctttacccaccagcacgattgggcgtgcatcttcgctcgcgttgcctttgtactcaatcacgctcatcaggctttcgttttggctaccctgaccgaccgccagataggaatgcatccccagctctttcatctgctgttcgccgataacgcgggtgatgacattcttgctgtagctgtcagccagctggcgcgcttgactagcgaggtaagcggcgttacagatattcggcggcatattgccgagatcttttgctgctttaatcccggcggcaatcgccagaccgtgctggatcgcgcgctcaccgctggtcagttcacggcgggtcggcacgttgaacaccatcttacgcagcggacgacgcggttcgctcttgttcgttttcagctgatcgaaactgtagagcgtctcttttgccgtctcgacagcctgacgcactttccagtagttgttacggcctttaacgtgcagctcagtcagaaagcagaccgcttccatactgccagtatcattcagcgtattaatggttttctgaataacctgcttgtactgacgctcatccagctcacgttctttgccgcaaccaataaggagaattcgctcggaaagtacattcggaacatggtgcagcaacaatgtctgccccggttttccttccagttcgccccgacgtagcagggcgctgatgtacccatcgctgattttatcgagctgttctgcaatcggagaaaggcgacgtggttcgaagacgcccacgacgatgcaggaactccgctgtttctccgggctaccgctttttacactaaactccatgcactacgctcctgaatcttaaagacaacggcggtggctacagatagaattgcaagctttcgtaactcatgtccgctgttgcgatgacttcgtgttaatcttaacgttattacggcattggcacgtcagaacaaaatctgagaggtgaatccgttgagtataattatcttagcgacgatttcgacgactcaagagaataaatgacgtttaagccatgaaacaagctaaaatcctgcaaaagacgagtttttacgggcgtatttaaagtgataatcataagatatctggtgcgggagacgctcaaaagccagctggcgatactcttcatcttgcttttgatcttcttctgtcaaaagttagtgaggatcctcggcgcagcggttgacggcgatattccggcgaatctggtgctctcccttctcgggttgggcgtgccggaaatggcgcagcttatcctgccattaagcctgttcctcgggctgctgatgacgctgggcaaactgtataccgaaagtgaaattacggtaatgcatgcctgcggcctgagcaaagcggttctggtgaaagcggcaatgatccttgcggtattcacggcaatcgtagcggcggttaacgtgatgtgggcgggaccgtggagtagccgtcatcaggatgaagtgttagcagaagcgaaagcgaaccctggcatggcggcgctggcgcaagggcaattccagcaagcgactaatggcagcagcgtgctgttcatcgaaagcgttgacggcagcgatttcaaagatgtgttcctcgcgcaaattcgaccaaaaggtaatgcacgtccttctgtggtggtggccgattccggacatttaacccagctgcgcgacggctcccaggtcgtcactctcaaccagggaacgcgcttcgaaggcactgcattgttacgtgatttccgcattacggacttccaggattatcaggcgatcattggtcaccaggcggtggcgctcgacccgaacgataccgaccagatggacatgcgcacattgtggaacactgacaccgatcgtgctcgcgcagaactgaactggcgtatcacgttggtattcaccgtgtttatgatggcacttatggtcgtaccgctgagcgtggttaacccacgtcagggacgcgtactgagcatgctgccagccatgctgctgtatctacttttcttcctgatccagacctccctgaaaagcaacggcggtaaaggtaagctggacccgacgctgtggatgtggaccgttaacctgatttatctggctttagcgattgttctcaacctttgggacaccgtgccggtccgccgcctgcgcgccagttttagccgtaaaggagcggtgtgatgcaaccttttggcgtacttgaccgctatatcggtaaaactattttcaccaccatcatgatgacactgttcatgctggtgagcctgagcggcattatcaagtttgtcgatcagctgaaaaaagccgggcaggggagttacgacgcgttaggcgcaggaatgtataccttgctgagcgtgccgaaagatgtgcagatcttcttcccgatggcggctctgcttggggcgttgcttggtcttgggatgctggcgcagcgcagcgaactggtggtgatgcaggcttctggttttacccgtatgcaggtggcgctgagcgtgatgaaaaccgccattccgctggtcttgctgacgatggcgattggcgaatgggtcgcgccgcagggcgagcagatggcgcgtaactaccgtgcgcaggcgatgtacggcggcagcttgctctctacccagcaaggcttatgggcgaaagatggcaacaacttcgtctacattgagcgggttaaaggtgacgaagagttaggtggcatcagcatttatgcctttaacgagaatcgtcgtctgcaatccgtacgctatgccgctactgcgaagtttgacccggaacataaagtctggcgtctgagccaggttgatgaatctgatctgaccaatccgaaacagattaccggtagccagacggtgagcggcacctggaaaaccaacctcacgccggacaaactgggcgtggtggcgctggacccggatgcactctctatcagcggtttgcacaactatgtgaagtatctgaagagcagcggtcaggatgccggacgttatcagctcaacatgtggagcaaaatcttccagccgctatctgtggcggtgatgatgctgatggcgctgagcttcatctttggcccactgcgtagcgtaccgatgggcgtgcgtgtggtcaccggtatcagtttcggttttgtcttctacgtactggaccagatcttcggcccgctgacgttggtttatggcatcccgccgatcatcggcgcactgttgccaagcgccagcttcttcttaatcagcctgtggctgttaatgagaaaaagctaaccgaatgaacgaataaagggagcgaaagctccctttattattgttagcaaagtgtgcttcgttcattcctgaaaaataattaaaattcaatatattgcagtggggtgggcatgataagacgcgccagcgtcgcatcaggcaaagacaaatctcgcctgacttaccttcttctcccccccagcaaactccccaacatcccgcgtacaatctgattcgtcacttggcgagcggcgcttttggccattgtttgcaccacaccatctttcttcccgccgcgtggtccggtagtgccgaacaaaatatccttcaatccaccaagaatgccgtcatccaccgctacctctttccctttcgcgggaggattattttgctgctcggtactggcctgaaagcctttttgcaacatctcataggcggattcccggtccacctcatcctcatatttgccatacaccggagagtgattaatcaagccattacgctcatcttccgtcaccggccccatccggctacaaggcgcgatcaccatcgcacgctccaccacagaagggcttcctttcgcatccagaaaagagatcaacgcctcgccggtgcccagttcctgaatcgccttttcggtatcaaacgccggattggcccgcatggtttgcgccgctgccttcactgctttctgatcttttggcgtaaaagcccgcaaagcatgttgaacgcgattaccgagctgcccgagcacattatccggaatatcagacgggttttggctaacgaaccagacgcccacgcctttactgcgaataagccttatcacctgctcaatcttatccagcagtacctgcggggcatcgttaaacagcagatgtgcctcgtcgaagaaaaacaccagttttggtttctccagatcgcccgcttccggcaattgttcatacaactcactaagcatccacagcaggctggcggcgtacagtttcggcatctgataaagtttctcggcgctgaggatattgataacgcctttaccgttggcatcggtgcgcatccagtctttgatatccagcatcggctcaccaaagaagtgtgctgcgccttgctgttccaggctcaacagcccgcgctggatggcaccaacgcttgcgctactgatattaccgtactgattctggaaggatttggcgttatcgccgatgtactgggtaattgcccgcagatctttaaagtcgagcagtaacagcccctgatcgtcagcaatgcggaagatgatattcagcacgccagattgcacatcgttgagattcaacagtcgtgccagcaacagcggccccagatcgctaaccgtcgcccgcaccggatggcctttctcgccaaagatatcccacaccaccaccggattggcatgcggttgccagtcattgacgccgatatttttaagccttgcgagcagtttttcgctcaccgttcctgcctgcgcgacgccggtcagatcgcctttcacatcagccataaacaccggcacgccgatttcgctcaaactctccgccagtttttgcagcgtaacggttttacccgtccccgttgcgccggtaatcagcccatgacggttagccattcccggcagtaaaaacagttctgtgtccggcgtgcgggcaattaacaggggttcactcatgagatatcctccagtttcctgcctggagtataggcaacgtccggcaaagagaatacgtgtaatgaagagaaaataacttaaagcgtgttgccgtgataaatctgatacccgaggtcaacagtgttgtggttgtgatcgttatttttaattttgctcagcaacatttgggcggccatccgaccaatatcaaaacggggagtaattacgctggcgaggcttgggatcatttgcctgccaatctccagcccatgaaaacccgcaatggaaatttgttctggcacggcgaggtttcgctcgcggcacagcagaagcgcacccatcgcaatatcgtcattggtgcaaaatacaccgtctaaatccgggtttgcgctaagggcatcacgcattaactgcattcctaaatgaatggaactgatggcgcgtggattcatgcgtaatggggaaagattatgcagcatcatcgcatcgcaatacccctgataacgctgttcatcgcgggtgtcatctttggaaccgagatacagaattttgtgcctgactcgcttctccagcatggtacacaccatgtcaaaagcggcctgccgattatcaaaaccgacctccatatccagccgttctccctgtacatccatcaattccacgaccggaatggtggcactacgcagaaatttcaccgtcctgatggtgtgatatttttcgctaagtataatcccgtcaatgttataagagagcaggttaatcacgctctcttcttcggaatcgcgatcgtaattgtaattagcaataagggtctgataattatgctcagaggtgacggattctattcccgcgagaatgtcagcgaagagttgattttgaaaactcggaatcaagataccgagggtataactttgtgcattcaacaacatgccgggagcgcgattagggatataattgatctcttccataattttggcgatgcgctcgcctgtttcctttgccacctttttcgggctgcggatataacgactcacggtcatttttgttacgccagccagcgtagcgatatcctgtaaagaaattctgtgattgcgcataacttctcccaacgtcgggggaatcttcaatcttcccccgaaactacatcacaatattttattctttcagtgcaatacggcgttaatggctaacacgcccagcaaacccataacagaaataagggtttccatcaccgtccaggtacgcaacgtttcaccaaccgtcagattaaaataccctttaaatagccagaagccagggtcgtttacgtgactcgcgatcacgctgcccgcaccggttgccagtaccattaaagcgggatcggcatgggtaacgttgataatcggcaacaccacacccgcggtggtaatggccgcgacggtggcagagcccagagcgatacgcaacagcgccgcaacagtccagcacatcaataacgggctaagtgtagttccggtcattaagtgactaatatagtgcccgacaccgctatctactaatacctgcttaaacgcgccgccgccagcgataataaacacaatcatcgcgatagcgcctatagaatccccaatgatatccatgatttgctcgatggtgcgtccattacgtcggcccagtgtgaaaatcgcaataacaatggcaataaacagcgcaacggcagggttaccgacaaattcaaagaagaggcgcacggtgttagttttcggtaacgtaatttcacaaacggcggcgatagccatcaggatgaccgggatcacggcagcgaaaatactgttccagaaggagggcatctcctcttcgctaaacagatgaggattaaataagccttccggtggtgctttctcaaagcgagttagcagtttagaaaacagcggtcctgcgacaataactgtcggaatggtaatgataaatccatacagtaaagtcgttccgagattagcctcaaagatagtcgcgatggcagtaggccctggatgtggcggcagaaaacagtgggttacagagagcgctgctaccattggtacgccaacatacaacaggggtaatccactacttgctacgatggtaaataccaacggcaacagcaggacaaaacccacttcaaaaaacatggcgaggcccacaaccagaccggtgatcactagcgcccattgcacgcgttttttaccaaaagtagcaatcagcgtagtggcgatacgttgtgccgcacccgtatcagaaatcagcttgcctaacatggccccgaaaccgaggatcattgccagcccgccgagcgtgctgccgataccattttgtatagagtgcaggacggcctgtgcatccatcccttcggcaaatccgacgacggcagctaccagaacgagggcaataaagccgttaactttaaagccgatcatcaggataagaagcagcgcgacgcctgccgcaataatgattaatggcatagtctttatctcttattagtgccagaaaagcagcgctttcgcgctgcacgtaggggggctgttaaacagccactaacatgccgccatcaacaaacaacaggtggccgtttacgaaatcagaggctttactagaaaggaacaccgcagcaccaatcagttcctgcggatctccccagcgtgcggcgggggtccgtttgcacaaccaggcggtgaaggcttcgtcctcaaccagtgctttagtcatttctgttttgaaatagcccggcgcaataccgttgacctgaatattgtggcgcgccagctcgacgcacatgccgcgggtgagcatttttaccgcccctttgcttgcggcataaggggtgatggtgtcacgtcccagttcgctttgcatgctgcaaatattaataactttacctgccttgcgttcaaccatgtgacgagttaccgcttggcttaccaggaacacggcggtctggtttactgcgatcacatcattccactcttgttcagggaactcagtaaaaggatgacggcgctggataccggcgttattcaccagcacatcaatggggccgatgtccttttcgatatgttcaacggcggcatcaatttcatgtttatgagtaacattaaaaggtgcggcaacggcctgaataccctcctggtggagtttttctacagcaagttctgcgcgttcggcagtaatatcattaataattatttgtgcgccatatttacccaggccggttgccagtaaaaagccaatgccctgtgcactaccggtaatcaagatattttttcctgccagactaaatagatcgttcattgtattattcctttatttatctcttagaaaacaagctggacttttgctgcctgggttttatcaccggcgaaacgtagcgcctcttccaggtcagtgaagggatattcagcactcagtaaaggcagtggattgataacgccattcgccagccaactcactgcggtattaaattcgctggtaaaacggaaagagcctctgagactaatctccttaccaatcaacgtcatcattgggaattctgccatcgcgcctcccatacctacctgcaccattacgccgcgtgcacgagtgacctccagacaggtattcacactactaggatgaccggacacttcaaagctgacatcgaaatagcctttttccgctttccagtgatccatgtcgtcgttttgtgggtttacgagcacatccgcccccatctctttgcccaggctaagggaacggggactcacatcagcacagacaatttccgcggcccccagtgttttcactgcactgacaatcaggcagccaatgggtccaacaccggaaataaatactcgcttgccctgtaactcgccggcctgatgtgcggcatgaatcgcgacggctaaaggttcggcaaaagccataaccttttcgtcagctttggccggataagggacacattggctcgtttcgaccattttataacgggtaaaaccaccatcaacatgagggaaatacatggcactgccaaaaaaacgcatatctgtacactgattctcgttatgttcaatgcagtatttgcagtgaccgcacggtttagacggattaatggctaccgtttgcccttcatgtaattcactactgtcgctatgaataactttaccgataacttcatgacctaacaccatcggtgcctttatcatgaaattacctacttttccttcctgataataatgtaaatcggaaccgcaaattccacctcgggttatttgtactaatgttccattattattccaatctatcgtctgctcggtaacggcaacagttttcttgcccgcaacaacgcaggactgtgttttcacttgcataaattcctcactggtcaggtagacacctcggaagcatttaagcggttttaactgtcattatttgtgatgaagatcacgtcagaaaattgttacattactatgttacgcataacgtgatgtgccttgtaattcttatcagtagaaataaaaaaacgtgaaattattatgccgccaggcgtagtatcgcagcaggtaagatgattcaggagattttaaatggcgggtgaaagctttattttgatgggcgttagtgggagtggtaaaacattaattggtagcaaggttgccgcgttattatctgctaaatttattgatggtgacgatcttcatccagccaaaaatatagataaaatgagccagggtattccattatctgatgaagatcgacttccctggctggaacgcttaaatgatgctagttacagtctttataaaaagaatgaaacaggatttattgtctgtagtagtttaaaaaaacagtatcgtgatattttacgcaagggtagcccccatgttcatttcctctggttagatggcgactatgaaactattctcgcgcgaatgcagcgtcgggctgggcattttatgccggtagcgttactaaaaagtcagtttgaggcactggagcgtccacaagcagatgaacaggatattgtgcgcattgatatcaaccatgatattgccaatgtcaccgaacaatgtcggcaggctgtgctggcgatacgacaaaacagaatatgtgcgaaagagggcagcgccagtgatcagcgctgcgaatgattttcaaaaatcggctttcaacaccacgcggtaacgcgccttaccgtcgcgcacatgctggatggcgtcgttaattttgctcatcgggaacagttcggtggtcggcgcaaccttgctgcgggcggcaaaacgcatcagcttacgcagctcataaggcgtgccggtagcagaaccagagacgctgcgatcgcccgcaattaacgtaaaggccggaacagacagcggcgtgagaaccgcaccgaccgtatggaaattaccgccataggtcagcgcctcaaaatagggctgccagtcgaggctgacgttgacggtgttgataatgagatcaaactgccccgccagtgctttcagtgcctgcggatcgcggctattcaccactttatcggcacccatcgccagcacttcctgctctttcgccggattagaactaaaggctgtcacctcgcatcccattgcgtgcagaagttttatagcgatatgccccagcccgccaataccaattaccccaacgcggctggtagcagtgatatggtgcatcaacagtggtttaaagaccgtgataccgccgcacaacagcggcccggcggactcgatatcaatattttctggcagtggaatcacccattgccagtccgcacgcaacttctcggcaaagccaccgcgattcataatcgtcggcaccgcaccttgctcgcagttgatctgattaccgctaatacaggcgtcgcagtgaccacagctacgcgccgtccagccaatcccgacacgctgaccgacctgcaaacctttatcctgcgcggcgctcccgagtgccaccacgcgcccaatcacctcatgcccggcaaccagcggatattgactaaatccccattcgttatcgatcatgctcagatcggaatggcagatcccgcagtaatccacctgcacttcaacatcttgtggcctcagctcaccgggatcgtactcataaacttccagttcgccgcccgcttcttttgcggcatagctttttatcatgctcattttttggtccttctctggtgttgtttgggaagtgtagagcatggcagggcggggtgcctggagtgtgacaaaggttacacatcgctgtatgcaatgctgaaaatttcagcacttagcgaggtgcgagcaagctggcgcttgcatggtggcgtgcgacaggtataatccacaacgttttccgcatacctcttcagtgccgaagtggcgaaatcggtagacgcagttgattcaaaatcaaccgtagaaatacgtgccggttcgagtccggccttcggcaccaaaagtatgtaaatagacctcaactgaggtctttttttatgcctgaaatccagtgtttatctatctttcccgctatattaactctctcaaggtcaaccgatatcaacgtacatctaccaacatatgttggtacagatgatggtatttccggttcgataatgcttgtaccaacagggagggaatacgagaaatcacaggacattgctaatgctggtacgcaatattacctgaagctaaaaacctgcacgttagccctttgtaggccagataagacgcgtcagcgtcgcatctggcataaacaaagcgcactttgctggtctgttcccctcaccctaaccctctccccggaggggcgaggggactgtccgggcacatttttagactttgtcatcagtctgagcctgccattggcaggctctggtgtccttttacgctaccatgctaataatcagcacaataatcagcccaaccacggagttgaccagctccagcagaccccaggttttcaacgtgtcttttacactcaggtcaaagtaacctttgaacaaccagaaagatgcatcgttaatgtgggtgagggtgttggaacccgcagccgtcgccagtaccagcagcgccggattcacgccaaccagctgaccagttgctggatctaggattgcagcactgataatcccggcggcggtcatcgcgctaacgacaccctgacccgtcgccagacgaattagcacagtgatcagccatgccatgatgtaggggctgatattgccgtgggacatcaacatgccgatggtgtcgccaatgccggtgtcgatgatggtctgcttcagcacgccacccgcaccgatgatcagaatcaccattgcaatactcttcaccgcgctttcaaaagcgttcatcacccactgcatgtcatgaccacgtgcggtgccaaagagtacgaatgcaaccaccatcgcaataaacattgcaatcgggctggaaccgataaagttaaccacttcccaggcaggggtatcttttaccagccagatattggcgatggtggtagagatcataatgatcgccgggatcagcggcaccagaatgctaacgccgaaagagggcagattattcatatctaccggttgatctgctttcaggaaacttggcgttgggcgctcaagattgccgaggaacttcggcaggatcagacctgcgcagattacacttgggatcgtcaccagtacgccatagatataaaccatccccatatccgcgccataagcattcaccagcgccaccggacccggctgcggtgggaacagactatgtgcggtagtggcagctgctactgccgggatcgccagtttcaggaacggaattttagcttcggcggcaataacaataaccagcggcgctaacatgataaaggccacttcatagaacatcgccagaccaaaaatcaggccgatgataatcacgctcagctgtacatagcgcagaccgagacgcgccagcagcgtatgcgctatctggtgagccgcgccggagtcgaccatcaatttaccgatgaccgcaccgaacaccacgatgatagccagttcccccagcgtgttgccgaagcccgctttcatagtgtgcagcaggctcatcaaatccatgcccgccagcatcccgacggacagcgccgccaccaacaaagccaccatactattgattttgaacttcaaattcagtaccagcatcagaccaatgccgaataccacccagagaatgttaagcacatgcataacgttttaccttacctggttgaaccgttgttattttgggcgatatgttatgtaaattggtcaaccattgttgcgatgaatgtcacatcctctgatcaataaccatcgattaccctttgctgcaatttgcagcaacaaccatgagagtgaaattcttgtgatgtggttaaccaatttcagaattcgggttgacatgtcttaccaaaaggtagaacttatacgccatctcatccgatgcaacgccacggctgcggtctggttgttcatccggatacctaaacaactccagggttccgcgtctctttgctgtggaacccactatgtgaaagaggaaaaatcatggaacagacctggcgctggtacggcccaaacgatccggtttctttagctgatgtccgtcaggcgggcgcaactggcgtggttaccgcgctgcaccatatcccgaacggcgaagtatggtccgttgaagagatcctcaaacgcaaggcgatcattgaagacgcaggcctggtgtggtctgtcgtagaaagcgtgccaattcacgaagatatcaaaacccacactggcaactatgagcagtggatcgctaactatcagcagactctgcgcaacctggcgcagtgtggcattcgcaccgtgtgctacaacttcatgccggtgctcgactggacccgtactgacctcgaatacgtgctgccagacggctccaaagctctgcgcttcgaccagatcgaattcgctgcattcgaaatgcatatcctgaaacgcccaggcgcggaagcggattacaccgaagaagaaattgctcaggcagctgaacgcttcgccactatgagcgatgaagacaaagcgcgtctgacccgtaacatcattgctggtcttccgggcgcggaagaaggctacaccctcgaccagttccgtaaacacctggagctgtacaaagatatcgacaaagcgaagctgcgcgaaaactttgccgtcttcctgaaagcgattattccagttgctgaagaagtcggcgtgcgtatggctgttcacccggacgatccgccgcgcccgatcctcggcctgccgcgcattgtttccaccattgaagatatgcagtggatggttgataccgtaaacagcatggcaaacggttttaccatgtgcaccggttcctacggcgtgcgtgctgacaacgatctggttgatatgatcaagcagttcggtccgcgtatttacttcacccatctgcgctccaccatgcgtgaagataacccgaaaaccttccacgaagcggcgcacctgaacggtgacgttgatatgtacgaagtggtgaaagcgattgttgaagaagaacaccgtcgtaaagcggaaggcaaagaagacctgatcccgatgcgtccggaccacggtcatcagatgctggacgacctgaagaagaaaaccaacccaggttactccgcaattggtcgtctgaaaggcctggccgaagttcgcggtgtcgaactggcgatccagcgcgctttctttagccgttaatatccaccggcatggctgcgcgccgtgccggttccttcttccttgccgtcactctttgaagacggattctggagtttacgatgactactattgttgacagcaatctgccggttgcccgcccgagttgggatcattctcgtctggaaagtcgcattgtgcatctcggttgcggggcgtttcaccgcgcgcaccaggcgctgtatacccatcatctgctggaaagcaccgacagcgactggggcatctgcgaagttaacctgatgccaggcaacgaccgcgtgctgatcgaaaacctgaaaaaacagcaactgctgtacaccgtagcggaaaaaggcgcagagagcaccgagctgaaaattatcggtagcatgaaagaagcgctgcatccggaaatcgatggctgcgaaggtattctcaacgcgatggcgcgtccgcaaacggcgattgtctctctaacggtcacggaaaaaggctactgcgctgatgcggcaagcggtcaactggatctcaataacccgctgatcaagcacgatctggaaaacccgactgcgccgaagtccgcgattggttacatcgtcgaagcgttgcgtctgcgtcgtgaaaaagggttgaaagcgtttacggtgatgtcctgcgataacgtgcgtgaaaacggtcatgtggcgaaggtcgcggtactggggctggctcaggcgcgtgacccgcagctggcggcatggattgaagaaaatgtcaccttcccgtgcaccatggttgaccgcatcgttccggcggcgacgccagaaaccttacaggaaattgctgaccagctgggtgtttacgacccgtgcgccattgcctgcgaaccgttccgtcagtgggtgattgaagataacttcgttaatggtcgcccggattgggataaagtgggcgcacagttcgttgcagacgttgtgccgttcgaaatgatgaagctgcgtatgctgaacggcagccactcttttctggcgtacctcggttacctcggcggctatgaaaccattgccgacaccgtgactaacccggcttatcgcaaagcggcctttgccctgatgatgcaggaacaagcgccaacgctgagcatgccggaaggtacagacctgaacgcctatgcgacgctgctgatcgagcgtttcagcaacccgtctctgcgtcaccgtacctggcagattgcgatggacggcagccagaagttaccgcagcgtctgctggacccggtgcgtctgcacctgcaaaacggcggcagctggcgtcacctggcgctgggcgtggctggctggatgcgttacacccagggcgtggatgagcagggtaatgccattgacgtggtcgacccgatgctggcggagttccagaagatcaacgcgcagtatcagggcgcagaccgcgtgaaagcgctgctgggcctgagcggtatttttgccgatgatctgccgcagaatgccgactttgttggcgcagtgacggcggcatatcagcagctgtgcgaacgcggtgcgcgcgagtgtgtggctgcgctgtaactaactgattaccctacagacttactggtcaatcaaactgatatttggttgaccagttttcgtttttttgcccacctgtacgtgccaacttccagtgctaatggtatagtttgagattaacgggggccgtaaaattgcccgttgtaggccggataaggcgttcacgccgcatccggcaaaaatttgattaaccgcacctaacggacacaacaccatgaaatctgccacctctgcgcaaagaccttaccaggaagtcggggcgatgatccgcgatctgatcataaagacgccgtacaatcctggcgaacggctgccgccggagcgtgaaattgcagaaatgcttgatgtcacgcggacggtggtacgtgaagcgctgatcatgctggagatcaaagggctggtggaagtacgccggggtgccggtatctatgttcttgataacagtggcagccagaacacagacagtccggatgccaacgtctgcaacgatgccggtccttttgagctgttacaggcgcggcagttattggagagcaacatcgccgagtttgccgctttgcaggctacccgcgaagatatcgtcaaaatgcgtcaggcattgcaactggaagagcgtgaactggcttccagtgcgccgggcagcagcgaaagcggtgacatgcagttccatctcgctattgccgaagcaacgcataacagcatgctggtggagctgttccgtcagtcctggcagtggcgggaaaacaatccaatgtggatccagttgcacagccatctggatgacagcctgtatcgcaaagagtggttgggcgatcacaaacagatcctcgccgcgttaatcaaaaaagatgcccgagcggcgaagctggcaatgtggcagcatctggaaaacgttaagcaacgtctgctggaattcagcaacgttgacgatatttattttgatggctatctgtttgatagttggccgctggataaagtcgacgcctgacttattataataagcgcaagggtaaacgttccttgcgctttcttaaattaagaagtcgcaatgagtattactttgtaaattgcagggtattgtttagctatctgtataacctgaatgttagtactcattcttcctggtagtaaggcgagattattaaagttgccatgcagcgtccggggaagtgttgggcgctgttttttttgtttcttaataatgtgttgtaagccgtagaaggcgtgtaggtcgcaccctatgcgacctacacatcagtcaggaattacccttcacgttctaccactttaatttccaccatgccgatcccgagcttacgcgggctgtgtccgaggatattcccttcgttggtactgacaggttccggcggcacaattaccagtgtgtcggcatcggttgggttatcgaaatgcagtgtggtggtggtcacttcattgcccagcacaagagtttgttcttcattgcctacgcgtaccggaataggacggctggcgttattgccgtatgctttggcggtaatcaccaggtcaaatttcttcggcagcggatgcttgtactcgatttttacttcatcgcccagctgcgcgttggaccagcggccccagctctccggacgggaaatcccgctaaactgtttcacctcttctggcgcaccggcgacgttaaagatgaaactgtcggctttgtagcgaatatcgttatcaacaatcttcagcgtatcgacattgcctttgtaacgcgccatgtcgatgaccgtatctttaaatgccgttttgccctgccatgttgttttgtcaacatgctgaacaatttgctgaccgccaagctgcccttggctgacacaccagtcggtggaaagtgccagttccggagcccagagttgtgccatcttgtagcaacggtcaacccagacgaaattgtcgcgtggagcgaaatcggccagctggaaacgcagcggtgcactgtattcgctttccggcagcggttccacgcgtttgtcactaacccgcaacagcagcggcaaacggaaatggctaccgctgaaggcaatcatgtttttctgctggtcgatggtgaactctttcatctctttagggaatttccacaggcggatgatatctggcttccacgccaatgttttctctttgatattgaggaagatttcgctcatgctctgcccggataaactgctacgaccaagtccgagatagttatcgccaccgagaatgtccagcaccgtcgcgccgttatccatcgtgttacgcttcactgccagcgtctcttgctgcggcttgtcgccacgaatgacaaaaaacaggttattgcgatcctgcttattgaggtatttccacgccgtgttgttcatcgctaaatggtcagaagagacgacgatgacggtatctttaaaccacggactcgctttgattttgttgataaacgtcgcgatgttctcctggctgcaacttaccgcgctgaaactctgattcggtttaccgtcaaaatcatattttttgcggttacaggtacgagagataaaaccatccgggtgatgggtatcgactgtcagggtaaacagactgaatcgctgaccactgcgggaaagctcttcaaactttttccacgcttcatcgagaacggtatcgtcgtagaatccccagtcgttgcgatagtgcgggtcggctaccacgcttttcagctcttcactgccgtataagtggtcgaagccatggctcttcaggaacacatctttaccggcaaaacgcagattcgcgccctgcacgaaatagttctgataaccgctgtttttcaggatatctcccagacagatgttctgcgggaagaagctggagacagaggcggaggcgttgccttcaaagggggcaaacagcggtatgccgcactgagaagccaccatgcccgcaatcgtgtaatctgttcccggcagctgctgcgtgtggctgaaatccaggccttcatttttcaacgcgcccagttcaggcgtgagatccgggaaagcctcgttatcaaaataggtccgctcgagactttcgccgtagatataaaccaggttgagtttcgggtcagggatagttttgctcggctctttataataagccgcaaagtccgggtcgccgtcgcgactctgggatttcaccagttccgttatctgacgaaatgccgggctggcgtccacgctacccagcgccagtaagagcgccagcaggctgtaaccaaaatggtgcggatgatggcgacgacggcgcaggatccagcccagcgcaccgaacaccgctgtcagccccagcacaatgccgatacccggcaaaatgtatttgctgacgccagcaccggtcaggctgttggttaaggtatagagaaccgcgtcgttaataccatcgccagtaaaatagtcgctggcaaacagggtgatatttaaaacgacaaatagccccagcaccgttaacgtggctgcaaaccaccaggtgttacgtcccgctttccatgcgtaaatcagcacagaggcgagaaaaagggcgaaagagagtagttcactcaacgggcgatcctcactaaaccgggccgtttagccaacgtttaagctttttgagaagcacaatgtaatggcgtcgccatattgctgcaattctagtgtcaaaaaaatgcgatgttgttaggaattagtttataaacagacttttttgattacggtcacttcccgtgtaacaggggtaaaaccgtccaggagcagggaaaagggcaggagagagccgcgtcagccgggtaacagctaaaacgcggcgtttcgcggttcaggaaatgaagttcagcccctgttttaacaccagatcgcaggctttggttttcaccttttctgccagcggagttgttccgatgttatccagattgagttgctgaccatctttggttttcagcaaaccctgaatgccgtccagatagttggtgtcttctttttgctcttcactgttcaggcccagcttttccagcacctggttcttgatgttttcggcatcggttacgctcgccagcttttgcttcgcgcagtattgcagaatgcctgcggcattgttcatgttatctgcgcttaaggcctggtttccgctgctaagcaagttagttaaactcgcgaggctccaaccgccttcctgtgtcgtgctgttttggttgccaagttcgctggcggcgctggagagcgcatctttccaggacgcagcatgcaccccggtggaaattaatgcgctggcggcaatggcacagcacagaagatgtttaacagttttcatcatcattactcaaggtggaattgtgtcgcagtataccgccagaaacggggattaatactctttacctgttacccggctacggtagctatcccagttgaagatcacccacaaactgttacccaggcgcatacggtccatcacgcgttcgcccagcaacttggtcatctcttccatattactgttggtcagcatcccggttgggcgtttggaagaagagcggcgatcgacgatctggttgatgatcactttttcgtatttgctttcggtctgcacgccgatctcatcgatcaccagcagatcaacgttgctcagatcgttaagcagttgttcttcgctggtaccgctattcctgaaggtatctttcatcgcgctcataatatcggccacggtgatgatcaatacggatttaccgcgtagcagcagctcgttgcagattgccgccgccagatggtttttgccggttcctggcttaccagaaaagatgaagctggcgatgttgccgtcaaactcttcgacatactggcgcgctttgcttaacgcattcatctgcccttcacactcaacgcgatagttctcaaaggaacagttctgatgcagtggacgaataccggagcggttaaaggtgcgctgcattttcatcgcccgattttcacgttcgagagcggcggagcggatcgctccttgttctttttgccaggccagtagttcttcacccgttttgaatgcgggtttgatatgggcaggcatcattttttgcaggcgttgcatcaggtcgccaacgtttttcatcgttaccctctgaatcctggtggaatttggctgtcaggttcgctgaccgtattcacatctcgtttcggcagtccgccgttgctggcacgaccgatttgcaggctgcgcgccagtttttgttgccactgcacatggtgaaagactttaccttccgcctgccagtaggcaatgaaactggccagttcttcggtggtcaccggctctcttagcgccacgccccatagcgccgccaggcggataaaatcggcatcgggttgccagtccggatacatggcgaatttccccatgggtacagcaacgggagcggcttgcggttcctgatagagttgatcgtccagagcgacatcgcttcccggacgcgccagcttttcttccagcgccagcagttcagccaggcgtgcaggcgtgacggcataaaacgccggggcattgttagcaaatacggcaaccacaccgccttcagcttttgccagaacggtttggtgatcgtgtaccagggcgtcaataccaacgacgtccggggtcaaaactctggaagacatactgtttctcaaatatggaacgatgaacgagaagggagataacttttatagtaacacacggaggagaggaggctgtctctcatccgtgtgcttaagcgaggcaattttatacgcgagggcgcttgcggtacaaccataatccaggaatggaaagaccgatggataacgcaccaacaatgctactagctgtaagaaagttggttaacagggtaatcatcaacggttcgctgtaacctaactggctgatttttaccgcgctaatcattgcggtataagcgcttatgcccgggaacatagggataacggccgccacggtaaacactttcggatgcgccagataccagcggctccattgaataccaatggtaccgaccagcatagaagccataaaggtactccactcaatattcaacccgctggtcatcaagatcattcgggaaccatgacctatcgagccaagcagcgcacaccagcgtaacgcccgcacgggaacgttgaacaccatcgcaaagccgaccgcaggaatggcggcgaggatcatatcctgcgccaacgctaacagaaattcgatcacacccatccgcgtagcccccaaatcgtcagtgccatcactacgccgacgcaggtagccagtgtcagcagactggcgatcgcccagcgtgccagtccggtattgatgtggcctttaaacatatcggcgacggcattaatcaacggaaagcccggcactagcagcagaacgctggcggccatcgcaatggtgggggtattgctgaaagtggggagttgcaaaagcaatccggaaatggtggtggcggcgaaagcggtaaggcaaaagttgatctgtggatgaagatgacgttgtgccagcagctggcggatatacatcgcggtcgtactggcaaagaaggtgatgacggcaccatcccagccaccgttattgagtttacagaaacaggcgcaagaaaggccaaccattaaggctaccagccatcttgggtaacgtaatggctgaatttggctaaatcgtttctctacgcctttgtaatccagcagatgatgctccgcaagaatcacaatgtgctggacttcagtcaccacatgcatattaatgccgcgatcgtgatttttacgtgtgcttgtcaggcattgcccatctttaatagttgtcagcactatggcgttgctagagatagaactttcgacgctgtccattcccagtgcccgacccagtcgactggaaagctcatcaaccaacgcgctttccgcaccatgttgcaaaagaaataatccacactggatacaaagccgtgttacggctcgctgttgctcagtttgcataactcgccctttgtcatagacgtgctgcgtattgttcagataatgagaatccatttgtatcatgaagcacggttgttttgcggtaggttaagatcaaaattgcgctgattaatcctggttatcgggagaagctcggtgataaaaagcgaattatctctcgccgcaaacaaactatcacatgaatattatcatcataatgaatttattgtttggcctttacgaatcaggataatagataaccgggcacgttttttaatgttaacaagctaaaaccatcagatttcattgaataaatattggttgtgtgattttgcattctgcgggaagggatatcatttaattataaattaaatgaatgtgatttctgtttttcattaagtattcctaacaacttaatgtagatattttaaatgtctccaggctatttcaccaggttatcatttgatgctaaccttctgacacatgcagtggagttgttgtgcagcaggagtatgctgatatgaaagtgaatgctaaggataatttattcgcttaatctattaatttgctggaaacatttaaggaatgaatatcctgaataaaccatcataatttttagacagtggatgtggaggaaatatgttgccaggatgctgcaaaaatggaattgttatcagtaaaatacctgttatgcaagcagggttaaaagaggtcatgaggactcacttccctgaatatgaaataatatccagcgcctctgcggaggaccttaccttattacaattacgtcgttccggattagtcattgctgatttagccggtgaaagtgaagatccacgttctgtttgtgaacattattattctttaatcagtcaatatcgggaaattcactgggttttcatggtgagtcgctcctggtattcccaggcagtagaactgctcatgtgccctacggcgacgttattgtctgatgttgaacccattgagaatctggtcaagaccgtacgttccggcaatacgcacgcagagcgtatcagcgccatgctgacctccccggcaatgactgaaactcatgattttagctatcgctccgtcattctcactcttagtgagcgcaaggtactgcggctattaggtaaaggatggggcatcaaccagatagctagtttgcttaagaaaagtaataaaactatcagcgcccaaaaaaacagtgcgatgcgtcgactggcaattcacagcaacgctgaaatgtatgcatggataaatagcgcgcagggtgcaagagaacttaacttgccttctgtttatggagatgccgcagaatggaacacagccgaattaagaagagaaatgagccacagttaaaaaaatgcgtcatgagtagtatcggtattgagagtttattcagaaagtttgcgggtaacccttataagctccatacctataccagtcaggagagttttcaggatgccatgagccggatcagctttgcggcggtcattttttctttttctgccatgagaagtgagcgcagagagggattatcttgcctgactgaactggcgattaagtttccgcgtacccggcgtttagttattgcggatgatgatattgaagctcggctgattggtagtttgagcccaagtccgctggacggtgtattaagtaaagcgagtacgctggagatttttcatcaggaactctttttgagtttaaatggtgtacgtcaggcgaccgaccgactgaacaatcagtggtacattaaccaaagccggacgttaagcccgacggagagagaaatattgcgctttatgagccgtggctacagtatgacacaaattgccgagcagcttaaacgcaatatcaaaacgatccgtgcacataaatttaatgtgatgagcaaactgggcgtcagttctgacgcagggttgttggaggccgcagatattctgttatgtatgcggcattgcgaaacaagtaatgtgttgcatccctattaatccgcatgatgccgggtttacttccccggcagtgctttcatttcagcgtacaatcgccacattgctgcacatccggtaagcgataacgctggcagcaagtgcggcgcaccagcaggccgtcgcgcagtaccacggtacgccagagtggattatcttcaccgttcgtgagcgttttctcaaaaaagagggcatggcgcaggctttcaacagtagcctcgccgagcagttgcttcatctcagtgagataccagttgatcaaataaccggtattactccagataagtttgccgttgatctctccggtcgcttctagtgcttgcacaaccggaaccagcgcctggctgattaacgtttccattcgatgctgcgggctatgtggtgttgcgtttttatcttcacacacatcgacccagaaacaggcgacgcgtccggtttcgtgaaactcagcatggaaatgttccgggctcacatctaatgccttttcctgcgtcagtagcgccagcattaatggtggcaccatcaggccgatataccattgtgcccatagactgatcagcggtttgttctcgcggatcatcatcggttggttgcgatagatatgatcggaatagaccgccagcagagaacttagcacattcggactactccattgcgccagcgtcatggcgttaagtggggcaggttcatccaggcggataaactccagcaaatgttcacgatgttttgcgatcgtcgcccgcacggcttgcgcaagcgtgggatcctgcggctggagatgcgttcgccagatgacatcttcatagagcggtgcggaacgataggccataatcgggatagtaatctaaatgataatgattgctaatcatagcgataggtttacccgatagcaagggatttatctggcttgcaaatgataaaaattatcatatgatattggttatcattatcaatgaaagagatgaaatcatgttgcaacgtacgctgggcagtggctggggagtgttgctgccgggattgctgattgcggggctgatgtatgcggatttaagcagtgatcagtggcggattgtcattctgatgggattagtattgacgccgatgatgctgtatcacaaacagttgcggcattacattttgctaccaagctgcctggcacttattgctggcatcatgctgatgataatgaatttgaatcagggatgaaaaatcaaggaagaaacaagaaaggaagtaaagataattggtgcgaggggggggacttgaacccccacgtccgtaaggacactaacacctgaagctagcgcgtctaccaattccgccaccttcgcacagtcatcttactttttttgatatcgcctcgtttggtgcgaggggggggacttgaacccccacgtccgtaagaacactaacacctgaagctagcgcgtctaccaattccgccaccttcgcccagtgcgagcaatatcaacgtggtttttggtgcgagggggggacttgaacccccacgtccgtaaggacactaacacctgaagctagcgcgtctaccaattccgccaccttcgcataccatcaattcttaaaaagaattgctaccacggaggcgcattctagtggttttcagcttttcgtcaatagttaattatcgacagaggtgtaattgctggaaaaatgtccatcaggaaactagcgtgcaggtttggtatgcatgcgggggcagatgccagatgcgacgctggcgcgtcttatctggcctacgaagggctaacgtgcaggttttgtaggtcggataaggcgttcacgccgcatccgacacggtattcggcgagataattaacctttcttcgcctggcgggtcataatggcgcgatacaccttgaagcgccctgtttgcgcgatcacttcgtggaagccaaatgtctcatccagcacgtccggataaggcaggaaggcgttcgctacaattcgcagctcgccgccgctattaagatgacgcaccgcaccgcgaatcagcgtttgcgccgcatccaggctggtttgcatcccatcgtggaacggcgggttggagatgatcatatcaaaacgacctttcacctcggaaaagacgttgctggcaaagacttcaccttcaacaccgttggccgcaagtgttgcgcggctggcttctaccgccggggcagagacatcgcacaaggtgagacgaattttcgggctatggcgcgcaaaggcaacactaagcacgcccgcgccacagccgacatccagcactttacctttcgtgtgcggagttaacgtgctgagcagcaactggctaccgacatccagaccgtcgcggctaaacacgccaggcagcgttttgaccgtcaggccatcgacgctgtattcgccccagaatttctccgcatcaaataccggctgtttttccagacgaccaaaatagaggccacagcgacgagcgctgtcgactttattcaacggcgcataatctgccagcatctgctcggcgctgcgcacgccgctgcggttctcgccaacgacaaaaatatctgtccccactggcagcagagaaagtaaattcatcaactggaactgggcttccggtttgttcttcggccagtagtaaatcagcgtatcgcaatctgcgacgtcatccgccgtggcgaccagactgaaacgggcgttatcccccatctggcggcttaatacctgccagtggtggaattgctgggtatgagcacggctggccgcggtatctaaacgcgcgggcaggtcatcctgtaagtctccggcaaacagaatacggctttgttcgaaatcatcactgtgacgcagcaagacttcacttgccggggtaaatgcagacatggaatgctcctcaattgatactggcggcgattatagccatatgttggcgcggtatcgacgaatttgctatatttgcgcccctgacaacaggagcgattcgctatgacatcccgacgagactggcagttacagcaactgggcattacccagtggagcctgcgtcgccctggcgcgttgcagggggagattgccattgcgatcccggcacacgtccgtctggtgatggtggcaaacgatcttcccgccctgactgatcctttagtgagcgatgttctgcgcgcattaaccgtcagccccgaccaggtgctgcaactgacgccagaaaaaatcgcgatgctgccgcaaggcagtcactgcaacagttggcggttgggtactgacgaaccgctaagtctggaaggcgctcaggtggcaagtccggcgctcaccgatttacgggcaaacccaacggcacgcgccgcgttatggcaacaaatttgcacatatgaacacgatttcttccctcgaaacgactgatttaccggcggcttaccacattgaacaacgcgcccacgcctttccgtggagtgaaaaaacgtttgccagcaaccagggcgagcgttatctcaactttcagttaacgcaaaacggcaaaatggcggcgtttgcgattacgcaagtggtgctggatgaagctacattgttcaatattgcggtcgatcctgactatcagcgtcagggattgggaagggcgctgctggaacatctgatcgacgaactggaaaaacgcggcgtggcgacactatggctggaagtccgtgctagtaacgctgccgccattgccctgtacgaaagtttaggctttaacgaggcgacgattcgccgcaattactaccccaccacggacggtcgcgaagacgccatcatcatggcgttgccaatcagtatgtaatacaaggtggaataatgaagtgggactggattttctttgatgccgatgaaacgctgtttacctttgacagtttcaccggcctgcagcggatgtttcttgattacagcgtcacctttaccgctgaagattttcaggactatcaggccgttaacaagccactgtgggtggattatcaaaacggcgcgatcactagtttacagcttcagcacgggcggtttgagagctgggccgaacggctgaacgtcgagccaggtaaactcaacgaagcctttattaatgcgatggcggaaatctgcacgccgctgccgggcgcggtttctctgcttaacgccattcgtggcaacgccaaaatcggcatcatcaccaacggctttagtgccttgcaacaggtgcgtctggaacgcacgggcctgcgtgattacttcgatttgctggtgatttccgaagaagttggcgttgccaaaccgaataagaaaattttcgattatgcgctggaacaggcgggcaatcctgaccgtagtcgcgtgctgatggttggcgacactgccgagtccgatattctcggtggcatcaacgccgggcttgcgacctgctggctgaatgcacaccatcgcgagcaaccagaaggcatcgcgcccacctggaccgtttctagcttgcacgaactggagcagctcctgtgtaaacactgattgcctcccccccgttgatgggtaaaatagccgcaatttttcgttttcaacaagcgcggcgcgatgccgcttactcaagaagaaagaattatgacgttgtctccttatttgcaagaggtggcgaagcgccgcacttttgccattatttctcacccggacgccggtaagactaccatcaccgagaaggtgctgctgttcggacaggccattcagaccgccggtacagtaaaaggccgtggttccaaccagcacgctaagagcgactggatggagatggaaaagcagcgtgggatctccattactacgtctgtgatgcagtttccgtatcacgattgcctggttaacctgctcgacaccccggggcacgaagacttcagcgaagatacctatcgtaccctgacggcggtggactgctgcctgatggttatcgacgccgcaaaaggtgttgaagatcgtacccgtaagctgatggaagttacccgtctgcgcgacacgccgatcctcacctttatgaacaaacttgaccgtgatatccgcgacccgatggagctgctcgatgaagttgagaacgagctgaaaatcggctgtgcgccgatcacctggccgattggctgcggcaagctgtttaaaggcgtttaccacctttataaagacgaaacctatctctatcagagcggtaaaggccacaccattcaggaagtccgcattgttaaagggctgaataacccggatctcgatgctgcggttggtgaagatctggcacagcagctgcgtgacgaactggaactggtgaaaggcgcgtctaacgagttcgacaaagagctgttccttgcgggcgaaatcactccggtattcttcggtactgcgctgggtaacttcggcgtcgatcatatgttggatggcctggtggagtgggcacctgcgccgatgccgcgtcagactgatacccgtaccgtagaagcgagcgaagataaatttaccggcttcgtatttaaaattcaggccaacatggacccgaaacaccgcgaccgcgtggcgtttatgcgtgtggtgtccggtaaatatgaaaaaggcatgaaactgcgccaggtgcgcactgcgaaagatgtggtgatctccgacgcgctgacctttatggcgggtgaccgtagccacgttgaagaagcgtatccgggcgatatcctcggcctgcacaaccacggcaccattcagatcggcgacacctttacccagggtgagatgatgaagttcaccggtattccgaacttcgcaccagaactgttccgtcgtatccgcctgaaagatccgctgaagcaaaaacagctgctcaaagggctggtacagctttccgaagagggcgcggtgcaggtgttccgtccaatctccaacaacgatctgatcgttggtgcagttggtgtgctgcagtttgatgtggtggtagcgcgcctgaagagcgaatacaacgttgaagcagtgtatgagagtgtcaacgttgccactgcccgctgggtagaatgtgcagacgcgaagaaattcgaagagttcaagcgtaagaacgaaagccaactggcgcttgatggcggcgataacctcgcttacatcgctaccagcatggtcaacctgcgcctggcacaggaacgttatccggacgttcagttccaccagacccgcgagcattaattcttgcctccagggcgcggtagccgctgcgccctgtcaatttcccttccttattagccgcttacggaatgttcttaaaacattcacttttgcttatgttttcgctgatatcccgagcggtttcaaaattgtgatctatatttaacaaagtgatgacatttctgacggcgttaaataccgttcaatgcgtagatatcagtatctaaagccgtcgattgtcattctaccgatattaataactgattcagaggctgtaatggtcgttattcatcactcatcgcttttgtgatggcgaccattgacttctgtagagggtgaagtctctccctattcagcaatgcaacctcgtgttgccaggctcaaattacgagcaaacatacaggaataaatcgatgactatgacaagactgaagattagcaaaactctgctggctgtaatgttgacctctgccgtcgcgaccggctctgcctacgcggaaaacaacgcgcagactaccaatgaaagcgcagggcaaaaagtcgatagctctatgaataaagtcggtaatttcatggatgacagcgccatcaccgcgaaagtgaaggcggccctggtggatcatgacaacatcaagagcaccgatatctctgtaaaaaccgatcaaaaagtcgtgaccctgagcggtttcgttgaaagccaggcccaggccgaagaggcagtgaaagtggcgaaaggcgttgaaggggtgacctctgtcagcgacaaactgcacgttcgcgacgctaaagaaggcagcgtgaagggctacgcgggtgacaccgccaccaccagtgaaatcaaagccaaactgctggcggacgatatcgtcccttcccgtcatgtgaaagttgaaaccaccgacggcgtggttcagctctccggtaccgtcgattctcaggcacaaagtgaccgtgctgaaagtatcgccaaagcggtagatggtgtgaaaagcgttaaaaatgatctgaaaactaagtaattcgtcgtaattcgtcctcccgaactttgtcgggaggcgcgatgtgcaccacactaaaaatatcgcattgagtgattttcacgctcatatcaagcggtgacattaactatggtaaaggagacgcttatgtttcgttggggcatcatatttctggttatcgcgttaatcgccgccgcacttgggtttggtggtctggccggtaccgctgcaggcgcagctaaaattgtctttgtcgtcgggattattctgttcctggtgagtttgttcatgggccgaaaacgaccctaaatttcagaccattaagaaaattttatccaaagccagtccagcggactggcttttgcggttttagcgaataataaattgcgttactttgtcattctttcacaacaaaaacaggaaggcagaggtggggcagcgaatacctgtaacgcttggtaatattgcgccgttgagcctaaggccgttccagcctggacgaatagctctggtgtgcgaaggcggcggacagcgtggaattttcacggctggcgtgctggatgagtttatgcgcgcgcagtttaatcctttcgatctttatctcggcacatctgccggggcgcagaacctcagcgcgtttatctgcaatcagcccggttacgcgcgcaaagtcatcatgcgctataccacaaaacgcgaatttttcgatccattgcgctttgtccgtggaggaaatcttatcgatctcgactggctggtggaggccactgcaagccagatgccgttgcaaatggataccgccgcgcggttgtttgacagcggcaaaagcttttatatgtgcgcctgtcgtcaggatgactacgcgccgaattactttttaccaaccaaacaaaactggctggatgtgattcgcgcctccagtgcgatacctggcttttatcgtagcggagtgagcctggaaggcattaactacctggatggcgggatcagtgatgcgattccggttaaagaggcggcaaggcagggcgctaaaacgttggtcgtcattcgcactgtgccgagtcaaatgtactacacgccgcagtggttcaaacgcatggaacgctggctgggtgacagtagcctgcagccgctggtcaatctggtgcagcatcatgaaaccagctatcgtgacattcagcaatttattgagaaaccaccgggcaagctgcggatattcgaaatttatccgccgaagccattacatagtatcgcgcttggcagtcggattccggcgctgcgtgaagactataaacttgggcgtttatgcggtcgttatttcctcgccacggttggcaagctattaactgaaaaagcgccgcttacccgccatctggtgccagtggtgacgccggaaagcattgtcattccgcctgcgccagtcgccaacgatacgctggttgccgaagtgagcgacgctccgcaggcgaacgacccgacatttaacaatgaggatctggcttgatttgccgttttatcgacacccactgccattttgatttcccgccgtttagtggcgatgaagaggccagcctgcaacgcgcggcacaagcgggcgtaggcaagatcattgttccggcaacagaggcggaaaattttgcccgtgtgttggcattagcggaaaattatcaaccgctgtatgccgcattgggcttgcatcctggtatgttggaaaaacatagcgatgtgtctcttgagcagctacagcaggcgctggaaaggcgtccggcgaaggtggtggcggtgggggagatcggtctggatctctttggcgacgatccgcaatttgagaggcagcagtggttactcgacgaacaactgaaactggcgaaacgctacgatctgccggtgatcctgcatagtcggcgcacgcacgacaaactggcgatgcatcttaaacgccacgatttaccgcgcactggcgtggttcacggtttttccggcagcctgcaacaggccgaacggtttgtacagctgggctacaaaattggcgtaggcggtactatcacctatccacgcgccagtaaaacccgcgatgtcatcgcaaaattaccgctggcaagcttattgctggaaaccgacgcgccggatatgccgctcaacggttttcaggggcagcctaaccgcccggagcaggctgcccgtgtgttcgccgtgctttgcgagttgcgccgggaaccggcggatgagattgcgcaagcgttgcttaataacacgtatacgttgtttaacgtgccgtaagccggataaggcgttcacgccgcatccggcagttggcgcacaatgcctgatgcgacgcttaacgcgtcttatcatgcctacaggtttgtgccgaaccgtaggccggataaggcgttcacgccgcatccggcagttggcgcacaatgcctgatgcgacgcttgtcgcgtcttatcatgcctacaagtctgtgccgaaccgtaggccggataaggcgttcacgccgcatccggcagtcggcgcataatgcctgatgcgacgcttgtcgcgtcttatcatgcctacaggtttgtgccgaaccgtaggccggataaggcgttcgcgccgcatccggcagttggcgcacaatgcctgatgcgacgcttgacgcgtcttatcaggcctacaagtctgtgccgaaccgtaggccgtatccggcatgtcacaaatagagcgccggaaatatcaaccggctcaccccgcgcacctttaacgcatcagccaacggctcaacgtcttccggcgtggcgctcgcccagctttgcgcctcgccatacacgccgtgggcatgaaacgcgttcaggcgtaccggaacatcgccgagtcccttgataaacgccgccagttcttcgatgtgttgcaaataatccacctggccagggatcaccagcaaacgcagttccgccagcttgccgcgctctgccagcaaatagatgctgcgcttaatctgctgattatcgcgtccggtgagttgttgatgacattcgctcccccacgctttgagatcgagcattgcgccgtcgcacaccgggagcaatttttcccagccggtttcgctcaacatgccgttactgtccaccagacaggtgagatggcgcagttgcggatcgtttttgatagcagtaaacagcgccaccacaaacggcagctgggtcgtggcttcaccgccactcaccgttatcccttcgataaacagcactgctttgcggacatggctaagcacttcgtccacgctcatggattgcgccatgggcgtggcatgttgcggacacctcttcaggcaggtatcacactgctcgcaaaccacagcgttccacaccactttgccgtcaacaatctgcaacgcctgatgcggacactgtggcacgcactccccacagtcattgcaacgtcccatcgtccacggattgtgacagtttttgcagcgcagattgcagccctgcaaaaacagagccagacgactgcctggcccgtcaacgcaggagaaggggataatcttactgactaaagcgcatctgctgttcatggcttatcacgcgcggctggcgttccagaatacgagtgttgcgtgcggcttcttcgcccagccaggtggtgttggtgcgactaccttcggcgcgatatttttctaaatcgctcaaacgcaccatataaccggtaacgcgaaccagatcgttaccgctgacattggcggtaaattcacgcattccggctttaaaggcaccgaggcaaagctgtaccagtgcctgcgggttacgtttgatggtttcgtcgagcgtcagaatgtcgctgatgccggaataataataagcatgatgcggggcgacagtttgcagatgggtgatcggatctggctcatcgccatacggcaaacgcgcgcccggcgtggtgccgatatcggaactgatcccgctctgtgcgtgtaacatggcgcgtttttgccagccatatttcacgggggtattggcgacaaactccgccagttgcgcgctgatgcgataacctacttcatttgcggcggcttctttaccgtagcgcgcggcaatcccttctttttcacacagcaagttaaccgcttccgccagcccatacatgccaaacattggcacaaaacgttcagggttaatcagcccttctttcaccaggaagctattctcaaagaagtgactttgttgatagaggaattcacaccgcgcatcgatgatggcgatctgctgctggcagtagtgcggtagagtgcgcgtaaagaagtcatccaggctttcgctgcgctcggcaatggctttcaggttaaggcgtaccagcgtgctgccaccacccgccagcggcagactgttgtaacagctcacaatcccgtagcccccttttgtgaaaattttatcatgcaccggaccgttggcgatgtgcggtttgctacattcacagatgttcttcgccacttccagcagcaggtcatcaggggtgatttcaggatcgtagataaaggtcaggttcggactaacctgcttcaactctgcatctgcacgtaagatcgcgcgggtaatggggctatcagacgggccgatattggcgtgcataaaggcgtctggcagggttctgtcgaggtaacgccagaaacgttttattcgaacatcgatctcgtcttgtgttagaattctaacatacggttgcaacaacgcatccagttgccccaggtagaccggcatgcttgtgacgctcggtacgtggtggtaaagaatggtcagcagagagagtgcgtcatcaagatctttcgcgccttccagctccagccattcggaaccgttcgccagaaaacgggcgtaatcgggtaagacatagcgcggtttgtacggcgcatgaccttcaaacatatcgcagattacaccttcatccagcgcgcggcgggcttcggcaggaagctgtgggtaaggcagattgttttctgcttccagtgccagaaaatggcgcttctgctccgggctaagcactgggctggtgacaatttgctggcaacgttgttgcagtgcattttcatgagaagtgggcatcttcttttccttttatgccgaaggtgatgcgccattgtaagaagtttcgtgatgttcactttgatcctgatgcgtttgccaccactgacgcattcatttgaaagtgaattatttgaaccagatcgcattacagtgatgcaaacttgtaagtagatttccttaattgtgatgtgtatcgaagtgtgttgcggagtagatgttagaatactaacaaactcgcaaggtgaattttattggcgacaagccaggagaatgaaatgactgatctgaaagcaagcagcctgcgtgcactgaaattgatggacctgaccaccctgaatgacgacgacaccgacgagaaagtgatcgccctgtgtcatcaggccaaaactccggtcggcaataccgccgctatctgtatctatcctcgctttatcccgattgctcgcaaaactctgaaagagcagggcaccccggaaatccgtatcgctacggtaaccaacttcccacacggtaacgacgacatcgacatcgcgctggcagaaacccgtgcggcaatcgcctacggtgctgatgaagttgacgttgtgttcccgtaccgcgcgctgatggcgggtaacgagcaggttggttttgacctggtgaaagcctgtaaagaggcttgcgcggcagcgaatgtactgctgaaagtgatcatcgaaaccggcgaactgaaagacgaagcgctgatccgtaaagcgtctgaaatctccatcaaagcgggtgcggacttcatcaaaacctctaccggtaaagtggctgtgaacgcgacgccggaaagcgcgcgcatcatgatggaagtgatccgtgatatgggcgtagaaaaaaccgttggtttcaaaccggcgggcggcgtgcgtactgcggaagatgcgcagaaatatctcgccattgcagatgaactgttcggtgctgactgggcagatgcgcgtcactaccgctttggcgcttccagcctgctggcaagcctgctgaaagcgctgggtcacggcgacggtaagagcgccagcagctactaagtaagatgctttacgcctgatgcgctgcgcttatcaggcctacgagacgtatctacccgtaggccggataaggcgtagacgcatccggcaaaagccgcctcatactcttttcctcgggaggttaccttgtttctcgcacaagaaattattcgtaaaaaacgtgatggtcatgcgctgagcgatgaagaaattcgtttctttatcaacggtattcgcgacaacactatctccgaagggcagattgccgccctcgcgatgaccattttcttccacgatatgacaatgcctgagcgtgtcagcctgaccatggcgatgcgagatagtggaaccgttctcgactggaaaagcctgcatctgaatggcccgattgttgataaacactccaccggtggcgtcggcgatgtgactagcctgatgttggggccgatggtcgcagcctgcggcggctatattccgatgatctctggtcgcggcctcggtcatactggcggtacgctcgacaaactggaatccatccctggcttcgacattttcccggatgacaaccgtttccgcgaaattattaaagacgtcggcgtggcgattatcggtcagaccagtagtctggctccggctgataaacgtttctacgcgacccgtgatattaccgcaaccgtggactccatcccgctgatcaccgcctctattctggcgaagaaacttgcggaaggtctggacgcgctggtgatggacgtgaaagtgggtagcggcgcgtttatgccgacctacgaactctctgaagcccttgccgaagcgattgttggcgtggctaacggcgctggcgtgcgcaccaccgcgctgctcaccgacatgaatcaggtactggcctccagtgcaggtaacgcggttgaagttcgtgaagcggtgcagttcctgacgggtgaatatcgtaacccgcgtctgtttgatgtcacgatggcgctgtgcgtggagatgctgatctccggcaaactggcgaaagatgacgccgaagcgcgcgcgaaattgcaggcggtgctggacaacggtaaagcggcagaagtctttggtcgtatggtagcggcacaaaaaggcccgaccgacttcgttgagaactacgcgaagtatctgccgacagcgatgctgacgaaagcagtctatgctgataccgaaggttttgtcagtgaaatggatacccgcgcgctggggatggcagtggttgcaatgggcggcggacgccgtcaggcatctgacaccatcgattacagcgtcggctttactgatatggcgcgtctgggcgaccaggtagacggtcagcgtccgctggcggttatccacgcgaaagacgaaaacaactggcaggaagcggcgaaagcggtgaaagcggcaattaaacttgccgataaagcaccggaaagcacaccaactgtctatcgccgtatcagcgaataacggtatactgatctgatcatttaaatttgaagcactgagtacggagaacatatgaaacgtgcatttattatggtgctggacagtttcggcatcggcgctacagaagatgcagaacgctttggtgacgtcggggctgacaccctgggtcatatcgcagaagcttgtgccaaaggcgaagctgataacggtcgtaaaggcccgctcaatctgccaaatctgacccgtctggggctggcgaaagcacacgaaggttctaccggtttcattccggcgggaatggacggcaacgctgaagttatcggcgcgtacgcatgggcgcacgaaatgagttccggtaaagataccccgtctggtcactgggaaattgccggtgtcccggttctgtttgagtggggatatttctccgatcacgaaaacagcttcccgcaagagctgctggataaactggtcgaacgcgctaatctgccgggttacctcggtaactgccactcttccggtacggtcattctggatcaactgggcgaagagcacatgaaaaccggcaagccgattttctatacctccgctgactccgtgttccagattgcctgccatgaagaaactttcggtctggataaactctacgaactgtgcgaaatcgcccgtgaagagctgaccaacggcggctacaatatcggtcgtgttatcgctcgtccgtttatcggcgacaaagccggtaacttccagcgtaccggtaaccgtcacgacctggctgttgagccgccagcaccgaccgtgctgcagaaactggttgatgaaaaacacggccaggtggtttctgtcggtaaaattgcggacatctacgccaactgcggtatcaccaaaaaagtgaaagcgactggcctggacgcgctgtttgacgccaccatcaaagagatgaaagaagcgggtgataacaccatcgtcttcaccaacttcgttgacttcgactcttcctggggccaccgtcgcgacgtcgccggttatgccgcgggtctggaactgttcgaccgccgtctgccggagctgatgtctctgctgcgcgatgacgacatcctgatcctcaccgctgaccacggttgcgatccgacctggaccggtactgaccacacgcgtgaacacattccggtactggtatatggcccgaaagtaaaaccgggcagtctgggtcatcgtgaaaccttcgcggatatcggccagactctggcaaaatattttggtacttctgatatggaatatggcaaagccatgttctgatggatttgggcggagcgttgactccgcctttgttatgtcacaaaaaggataaaacaatggctaccccacacattaatgcagaaatgggcgatttcgctgacgtagttttgatgccaggcgacccgctgcgtgcgaagtatattgctgaaactttccttgaagatgcccgtgaagtgaacaacgttcgcggtatgctgggcttcaccggtacttacaaaggccgcaaaatttccgtaatgggtcacggtatgggtatcccgtcctgctccatctacaccaaagaactgatcaccgatttcggcgtgaagaaaattatccgcgtgggttcctgtggcgcagttctgccgcacgtaaaactgcgcgacgtcgttatcggtatgggtgcctgcaccgattccaaagttaaccgcatccgttttaaagaccatgactttgccgctatcgctgacttcgacatggtgcgtaacgcagtagatgcagctaaagcactgggtattgatgctcgcgtgggtaacctgttctccgctgacctgttctactctccggacggcgaaatgttcgacgtgatggaaaaatacggcattctcggcgtggaaatggaagcggctggtatctacggcgtcgctgcagaatttggcgcgaaagccctgaccatctgcaccgtatctgaccacatccgcactcacgagcagaccactgccgctgagcgtcagactaccttcaacgacatgatcaaaatcgcactggaatccgttctgctgggcgataaagagtaattgtgtttcgctgcaaggcgattgccttgtgaagccggagcgggagactgctccggctttttagtatctattcatttttctctccagcttgaatattttcgctatacttttcagtgaaatgtgttaataaatctattcaagtatctattcacgaatctattcattaatgagcgagctgactgatcttttactgcaagggccgcgttctgccccggaattgcgccagcgtctggcaatcagtcaggcgacgttcagtcgccttgttgccagagaagatcgggtgattcgctttggtaaagcacgggcaacgcgatatgcactgctgcgtccttatcgcggaattgagcgtattcccgtctggcgggtggacgataccggaaaggcgcataaattcgccgacatccggttgtgctggccgcagggaagttgtctggtaacaggcgcagatggcgacgaacagtggtttgatggtttgccctggtatttgaccgatctccgaccgcagggctttttagggcgcgcgtggggcaggaagttagccgcgcaactgaatctgactgatgatatacgtctctggcaggaagaagatgtgctctacgccctgaccgtatttaacggtgaatatactggcggttggttggtcggggaggggaattatcagcgatggattactgcacaacaccctgcggaaattcctctggatcaaaaactcacccattacgaacagctggcaagtgatgcactggcaggagaaattgtgggttcttctgcgggcggcgagcagccaaaatttacctactatgcacaaacgccgagtggcaataaacatgtgttggtgaaattcaccgtaccacagcaaaccgcggtcagccaacgttggggtgacctgctaattgctgaatctattgccgcgcaaatcctgcgtgacggtgggatccacgccatcgagagtacggtgcttgtaacaagtaacaggcaggtattcctcgaagcggaacgctttgactgcaaaggtaacgatggtcgcttgcctattgtgagcctggaggcggtgcagagtgagtttatctcttctccgggaagctggccgcaggcaatgcgccgtttgtgtgagcaacaacttgtcactcaccagagcgtggcgcaaacagaagtgatctgggcatttgggcgacttatcgccaacagcgatatgcacgcaggtaatttaagcttttatttatctgaaccgccatttgcgctgacgcccgtctacgacatgctgccgatggtctatgcaccaaacagcgctggaatgctgcgtgatgctgccattgaggtgaagtttgatcttaacgtcagtaaaagcgcttggttaacggcgatcccgctggcgcagcagttctggcaaacggtcgccagagatccgcgtatcagcgaggcgtttcgccacattgcgcaagaaatgccggaaaaaatccggcaaatcgaagagaaagttgcccgcatgggcgggtaattaccttacagcccccgccatccatgcgcttaactcccgtagctctttttcctgttccgggaagtcaaccaacagcgcttcgcactcctgttgcagcatatctgcgcggtacaggcagccttgcagtcgtccggcgagggcttccagcggcgcggggttgaggctgtcggtaaacacctgggcgcgggtgatatggcctttttcaacgtcgaaatgcagttccacgccgccccaggtaaagcgttcatccagcagatggctgaatgccggagcctgaccgaagttccattcccagctactctggcgggcaaaggtttcggcgaagtttggcaagtctggcgttttgttcggggagatgatttccgcttccacgcgctcgccataatgggcgaaaaaggcctcggttatggcctcgcaaacctgctcatgggtgatccccggcaacagctcggtgaggttggtcacgcgggaacgtacgctcgtaatgcctttcgccgccagtttctttttatccggattgagatagtttgccaggcggctgaggtcggcattgagtagcaaggtgccgtggtggaagccgcgatctttggtttcgcgataggcgctgccactgactttgcggtcgccttcgacggttttcaccaccagatcgttacgtccggacgcttcggcgctgacgccgagcgcgttcagcgcattgagcacaatgctcgtggagatagttttatcgtactccggcttgccagccataaaggtaaagcaggtattgccgagatcgtggaacaccgcgccgccaccgctactgcgccgcgccaggcggacgttatcttcttccatccgccgggtattacactctttccacgggttctgcgcgcgaccaattactaccgtgtcggcattgcgccagagaaacagaacgcgctgcgtggcgggcatttggcgaaaaatacactcttccaccgccaggttaaaccacgggtcgtaagagtcagagatgagcaggcgtaatgtggacataacgatttcctttcttgtagtaatgggtcactcttttttctcgctttcttcctcttccggcaccggtttgctggcggctaacaggaaggggctttgctgccagcgggtgcgtttaccctgtagcagcgtgcgggtcagcactacaccgattgccagactgagcagcaacatcaggcgtaaaatgttagtggtgttatccacctgttgggcttcggtggcgagcgtatgggtgtcgagtgtcaggcgcagatagccgagcggtccgtttttacccgcaattggctcgacaatctgctggttaaaatagccgcctgcttttttaccgtcgagcgccagccggtcgcgcacttcgacgctttcgccagaacgtgcgataagatcgccttgttcgtcatacacacccgcgtcgaggatacggctttcatccgttaactgatcgaggatcgcctgaatgcgtttttcatccggactgtcggtacgcatcagcggtgcaacgttcagcgtcacctgacgcgccagggtgcgggccagttcttccagctgtggattacgctgtcgctggtggttttgactaaaccaactcgctccctgcatcagcgccactaacaaggcaagacagaacaggacaatcactgcccgatgcagccggaatttcagttttgtgcgagccatcttccaccctttgaaaatttgagacttaatgttgccagaagcaatggatacaaggtagcctcatgcgttattttccctgcttcgaacgattttacaggagccttaatgcctaacattacctggtgcgacctgcctgaagatgtctctttatggccgggtctgcctcttagtttaagtggtgatgaagtgatgccactggattaccacgcaggtcgtagcggctggctgctgtatggtcgtgggctggataaacaacgtctgacccaataccagagcaaactgggtgcggcgatggtgattgttgccgcctggtgcgtggaagattatcaggtgattcgtctggcaggtagtctcaccgcacgggctacacgcctggcccacgaagcgcagctggatgtcgccccgctggggaaaatcccgcacctgcgcacgccgggtttgctggtgatggatatggactccaccgccatccagattgaatgtattgatgaaattgccaaactggccggaacgggcgagatggtggcggaagtaaccgaacgggcgatgcgcggcgaactcgattttaccgccagcctgcgcagccgtgtggcgacgctgaaaggcgctgacgccaatattctgcaacaggtgcgtgaaaatctgccgctgatgccaggcttaacgcaactggtgctcaagctggaaacgctgggctggaaagtggcgattgcctccggcggctttactttctttgctgaatacctgcgcgacaagctgcgcctgaccgccgtggtagccaatgaactggagatcatggacggtaaatttaccggcaatgtgatcggcgacatcgtagacgcgcagtacaaagcgaaaactctgactcgcctcgcgcaggagtatgaaatcccgctggcgcagaccgtggcgattggcgatggagccaatgacctgccgatgatcaaagcggcagggctggggattgcctaccatgccaagccaaaagtgaatgaaaaggcggaagtcaccatccgtcacgctgacctgatgggggtattctgcatcctcagtggcagcctgaatcagaagtaattgctcgcccgccatcctgcgggcggcacagcattaacgaggtacaccgtggcaaaagctccaaaacgcgcctttgtttgtaatgaatgcggggccgattatccgcgctggcaggggcagtgcagtgcctgtcatgcctggaacaccatcaccgaggtgcgtcttgctgcgagcccaatggtggcgcgtaacgagcgtctcagcggctatgccggtagcgccggggtggcaaaagtccagaaactctccgatatcagccttgaagagctgccgcgtttttccaccggatttaaagagttcgaccgcgtactaggcggcggcgtggtgccaggaagtgccattctgattggcggtaaccctggtgcggggaaatccacgctgctactgcaaacgctgtgcaaactggcccagcagatgaaaacgctgtatgtcaccggcgaagagagcctgcaacaggtggcaatgcgcgctcatcgccttggcctgccgactgacaatctcaatatgttgagcgaaaccagcatcgaacagatctgcctgattgccgaagaagagcaaccgaagctgatggtaattgacagcatccaggtgatgcatatggcggatgtacagagtagccctggtagcgtggcgcaggtgcgtgaaacggcggcttatttgacacgcttcgccaaaacgcgcggtgtggcgattgtcatggtggggcacgtaaccaaagatggtagcctggctggcccgaaagtgctggaacactgtatcgactgtagcgtgcttttggatggcgatgccgactcccgttttcgcaccttgcgcagccataaaaaccgcttcggcgcggtgaatgagctgggcgtcttcgcgatgaccgaacaggggctgcgtgaagtcagcaaccctagcgcaattttcttaagtcgcggcgatgaagtgacctccggtagcagtgtgatggtggtatgggaaggaacgcgtccactgctggtggagattcaggcgctggtcgatcacagcatgatggcgaacccacgccgcgtggcagtggggctggaacaaaaccgtctggcaatcctgctggctgtgttgcaccgtcacggtggtctgcaaatggccgatcaggatgtgtttgtgaacgtggtcggcggcgtgaaggtaaccgaaaccagtgccgacttagcgttactgctggcgatggtttccagcctgcgcgacagaccgctgccgcaggatctggtggtgtttggtgaagtcgggctggcaggggagatccgcccggtgcccagcggtcaggaacgaatctctgaagcggcgaaacacggttttcgccgggcgattgttccggcggctaacgtgccgaaaaaagcgccggaagggatgcagatttttggcgttaaaaaactctccgacgcgcttagcgtgttcgacgacttataatgagatatacggagggagatatgagcagttttgattacctgaaaactgccatcaagcaacagggctgcacgctacagcaggtagctgatgccagcggtatgaccaaagggtatttaagccagttactgaatgccaaaatcaaaagccccagcgcgcaaaagctggaggcgttgcaccgttttttggggcttgagtttccccggcagaagaaaacgatcggtgtcgtattcggtaagttctacccactgcataccggacatatctaccttatccagcgcgcctgtagccaggttgacgagctgcatatcattatgggttttgacgatacccgtgaccgcgcgttgttcgaagacagtgccatgagccagcagccgaccgtgccggatcgtctgcgttggttattgcaaacttttaaatatcagaaaaatattcgcattcatgctttcaacgaagagggcatggagccgtatccgcacggctgggatgtgtggagcaacggcatcaaaaagtttatggctgaaaaagggatccagccggatctgatctacaccagcgaagaagccgatgcgccacagtatatggaacatctggggatcgagacggtgctggtcgatccgaaacgtacctttatgagtatcagcggtgcgcagatccgcgaaaacccgttccgctactgggaatatattcctaccgaagtgaagccgttttttgtgcgtaccgtggcgatccttggcggcgagagcagcggtaaatccaccctggtaaacaaacttgccaatatcttcaacaccaccagtgcgtgggaatatggccgcgattatgtctttagtcacctcggcggtgatgagatcgcattgcagtattctgactacgataaaatcgcgctgggccacgctcaatacattgattttgcggtgaaatatgccaataaagtggcatttatcgataccgattttgtcaccactcaggcgttctgcaaaaagtacgaagggcgggaacatccgttcgtgcaggcgctgattgatgaataccgtttcgatctggtgatcctgctggagaacaacacgccgtgggtggcggatggtttacgcagcctcggcagtagcgtggatcgcaaagagttccagaacttgctggtggagatgctcgaagagaacaatatcgaatttgtgcgggttgaagaggaagattacgacagtcgtttcctgcgctgcgtggaactggtgcgggagatgatgggggagcagagataaccgtgatgaaactgctcaaaggcgaggtataaaatgagtttttttgatgagttgaaaacctctctggaagaggctgtcgagattaaacaaggtttgaaaaaacctgcacgggtgacccgccacgaaattgaggatgctaaggctgttgtagaccggaaacggtgttcacgccgcatccggcattcggtgctcaatgcctgatgcgacgcttaccgcgtcttatcaggcctacagttttacaacgtattgaaattgctggttttgtaggccggataaggcgttcgcgccgcatccggcattttacgcattacttcgcaatacgcttgtacttgatacgcttcggctccagcgcgtctgcgcccagcgtgcgtttcttgtactcttcgtactcggtaaagttaccttcgaagaactcaactttaccttcatcctggtaatccagaatgtgcgtggcgatacggtcgaggaaccaacggtcgtggctgataaccatcgcacagcccgggaactccagcagggcgttttccagcgcgcgcagggtttcgatatccaggtcgttggttggttcgtcgagcagcagcatgttgccgccaacctgcagcagcttcgccagatgcagacgaccgcgctcaccaccggagagttcaccaacgcgtttaccctgatcaacccctttaaagttaaagcggccaacgtaggcgcggcttggcatctcggtgttgccgatcttcatgatatccagcccgccggaaacttcttcccaaacggttttgctgttatccatactgtcacggaactgatcaacgctcgccagtttcaccgtttcacccaaagtgatggtgccgctgtccggctgttcctgaccagagatcatacggaacagggtgcttttacccgcaccgttcggaccgatgatcccgacgatcgctcctttcgggatgctgaagctcaggtcatcaatcagcagacgatcgccataggatttacgcaggttgctgacttccagcactttatcgcccagacgcggtccaggtggaataaacagttcgttggtttcgttacgtttctgatattcggtgctgttcagttcttcaaagcgcgccagacgtgctttacctttgctctgacggcctttagtaccttgacgtacccattccagctctttctcaatgctcttacgacgcgccgcttcttgactagcttcctgcgccaggcgctgatctttctgctccagccaggaggagtagttaccttcccacggaataccttcaccgcggtcaagttcgaggatccagcctgcaacgttatcgaggaagtaacggtcgtgggtaatcgccacaacggtgccttcgaagtcgtgcaggaagcgttccagccaggccacggattcggcatccaggtggttggtcggttcgtcgagcagcagcatgtctggtttttccagcagcaggcggcacaacgctacgcgacgacgttcaccaccggagaggttagcgattttcgcgtcccagtccggcagacgtagcgcatccgccgcacgctccagctgtacgttcagattatgaccgtcgtgagcctgaatgatctcttccagacggccttgttcagcggccagcttgtcaaaatcggcatccggatcggcgtacagcgcatacacttcatccaggcgtttcagggcgttaaccacttcactaaccgcttcttcaatggactcacgcacggtgtgttccgggttcagctgcggttcctgcggcagataaccaatcttgatgtctggctgcggacgcgcttcaccttcgatgtctttatcaatgcccgccataatgcgcagcagggtggacttacccgcgccattcagacccaggacaccaatttttgccccagggaagaaactcagagagatgtttttcaaaatatgacgtttcggcggaacaactttgccgacacgatgcatggtataaacgaattgagccacgttggacttcgcctctatgtttatcgtgataatgagttttcaaaggcgaagtgtagcctttttccccgcctaatcccagccggtcgatcaccctcgcagtaaaagtaaaaaagtgtccgtaacgtggcgtaaacggcaatgactggttagcataaatctattacgcggcatgacgctgcattgatgtatttacacttagaggatgcgcttgtggaaaaagccaaacaagttacctggcggctgttggctgccggtgtctgtctgctgacggtcagcagcgtggcgcgagccgacagtctggatgagcagcgtagtcgttacgcgcaaatcaagcaggcctgggataatcgacaaatggatgtggtcgaacaaatgatgcctggactgaaggattatccgctttatccctacctggaataccgccagatcaccgatgatctgatgaatcaaccggcggtgacggtcactaactttgttcgcgctaaccccacgcttcctcccgctcgcacgctgcaatctcgtttcgtcaatgaactggcgcggcgtgaagactggcgtggcttgttagcctttagcccggaaaagcccggaactaccgaagcgcaatgtaattactactatgcgaaatggaacaccgggcagagtgaagaagcctggcaaggggcgaaagagctgtggctaaccggcaagagccagcctaacgcctgtgacaagttatttagcgtctggcgtgcgagtggtaaacaagatccgctggcgtatttagagcgtatccgtctggcgatgaaagcgggtaacacaggcctggtaacagtgctggcagggcagatgcctgccgattaccagactatcgccagcgcaatcattagtctggcgaacaaccctaatacggtactgaccttcgcgcgtacaactggcgcgaccgattttacccgtcaaatggcggcggtggcgtttgccagtgtggcgcggcaggatgctgagaatgcacggctgatgatcccaagccttgcccaggcgcagcagcttaatgaagatcagattcaggagctgcgcgatatcgtcgcctggcgtttgatgggcaacgatgtcaccgacgagcaggcgaaatggcgcgatgacgccattatgcgcagccaatctactagccttattgaacgccgtgtacgaatggcgcttggcaccggcgatcgtcgcggcctgaatacctggctggcgcgtctgcctatggaagcgaaagagaaagatgaatggcgttactggcaggcggatttattgctggaacgcggacgtgaagctgaagcaaaagagattttgcatcaactcatgcaacagcgtggtttctacccgatggttgcagcacaacgcatcggcgaagagtatgagctgaagattgataaagcgccgcagaatgttgacagcgccctgactcaggggccggagatggcgcgcgtgcgcgagttgatgtactggaatctcgataataccgcgcgtagcgagtgggccaatctggtgaagagcaagagtaaaacagagcaggctcaactggcgcggtatgctttcaacaaccaatggtgggatcttagcgttcaggcaacgatcgccgggaagctgtgggatcatctggaagagcgattcccgctggcttacaacgatcttttcaagcgctacaccagcggtaaggagatcccgcaaagctatgcgatggcgattgctcgtcaggagagcgcctggaatccgaaagtgaaaagtccggtaggggccagcggcttgatgcagattatgcctggtacagcgacccatacggtgaagatgttctctattcccggttatagcagtcctgggcaattgctggatccggaaacgaatatcaacattggcaccagttacctgcaatatgtttatcagcagtttggcaataatcgtattttctccagtgcagcttataacgccggaccagggcgggtgcgaacctggcttggcaacagcgccgggcgtatcgacgcagtggcatttgtcgagagtattccattctccgagacgcgcggttatgtgaagaacgtgctggcttatgacgcttactaccgctatttcatgggggataaaccgacgttgatgagcgccacggaatggggacgtcgttactgatccgcacgtttatgatatgctatcgtactctttagcgagtacaaccgggggaggcattttgcttcccccgctaacaatggcgacatattatggcccaacaaagtccctatagtgcagcgatggcagaacagcgtcaccaggagtggttacgttttgtcgacctgcttaagaatgcctaccaaaacgatctccatttaccgttgttaaacctgatgctgacgccagatgagcgcgaagcgttggggactcgcgtgcgtattgtcgaagagctgttgcgcggcgaaatgagccagcgtgagttaaaaaatgaactcggcgcaggcatcgcgacgattacgcgtggatctaacagcctgaaagccgcgcccgtcgagctgcgccagtggctggaagaggtgttgctgaaaagcgattgattttgtaggcctgataagacgtggcgcatcaggcatcgtgcaccgaatgccggatgcggcgtgaacgccttatccgtcctacaaatacccgtaatttcaatatgtttggtaggcatgataagacgcggcagcgtcgcatcaggcgcttaatacacggcattatgaaacggactcagcgccaggatcaccgcctggtgatagacgctggcgcgagtgagtttcccggcggtaaacacgccgatcgccccttccttacgaccaatctcatcaataccggtataacggctcatcacgggaccaagcgcctcaccttcacgcactttttccagaatcaccgcaggcaacggcaaagtagcgctacgcgcctcgccgcgctggctggcgttttcaatcaccacccaactgaaagtgctgtcaccatcgatgccagcttcaatcgccacccaaaaatcagcctctggaagtaaacggcgggcattggctacccgatttcgtgcgccagcgcgcgtttcctcactgccaaagggctgttccggtacaccgctctcgacggcaacggatgcaatatggcaggatccttcgccgaagatctcgtgaaatgcctgcagaatggcctgaattttagcgggattggtggtcgcacagacaacttggtgcataatcagcattactcagaaaattaacgttacagcagtatacggaaaaaagcatgttacaggtatacctagtccgccacggtgaaacgcagtggaacgccgagcgacgtattcagggccagtctgacagcccgctgaccgccaaaggtgagcaacaggcgatgcaggtggcaacccgtgccaaagagcttggcattacgcatatcatcagtagcgatttaggacgcacccggcgtacggcggaaatcatcgcccaggcctgcggctgtgacatcatctttgattctcgcctgcgtgaattaaacatgggtgtgctggaaaaaagacatatcgattctctgaccgaagaagaagagaactggcgtcggcagctggtcaatggcaccgttgacgggcgtattcctgaaggcgagagtatgcaggagctcagcgatcgcgtcaatgcggcactggaatcttgccgggacttaccgcagggaagccgaccgctgctggtgagtcatggtattgcactgggatgcctggtgagtacgattctcggattaccagcatgggcagagcgccgcttacgtctgcgtaactgttctattagccgcgtggattatcaggaaagcctgtggctggcgtctggctgggtcgttgaaaccgcaggggacatcagccatctggacgcccctgcattagatgagctgcagcgttaacgacggatcggaatcagcagttcacagcgtagattaattgggcgatctcccgctttggcatcttctgccgggtagtatcgctcaatatcctgacctttacggcgcgtcaggttgagcattggcatgcacgttccgtataccgtcaggataaactcctgcacgccggttcccagaccttcataggtaaacatcacatattcgccgccctgcagcatcaccggatgccccgtcagtacatagccatctgcctgatcctgggctaacgcggtggtatagaatacctcttgctcgtcgtctttatcctgactcggacgcgtttcattcaggccgtagagcaccggcggaatggtcggcgcgttgccgagaaaatcgtgccagaactgataacgcatttcatggcggaaatcagagatttgctccaggctacaggagtagctctgggtaacaccaatcagcggcgtatcttccagggtgacaaatttgtgctctggcatagtgaattcacccaggcgtagcggcgggcgaataccaaaggcgctccattcaggagaacggcggtaaagtgcaggagtctgggcaaactgcttcttgaatgcgcgggtaaatgtctgttgagagtcgaagcggtattgcagcgcgatgtccagaatcggacgcgcagtcaggcgtagtgcgaccgcgcttttgctcaaacgacgagcacgaatatacgcgccaatagcatggccagtgacatctttaaacattctctgtaagtgccacttggaataacctgctttcgccgctacattgtcgaggctcaggggctgatccagatgaccttccagccagattaaaaggtcgcgaataatgccggcctgatccataaaatatcctcatcctttcaacaacgagcacctgacatcaggtaattggataatagcattttttgctgttttagcattcagtgtttttttcttagtagagtatgttttagggcttgacggaaataaaagtattgagattttgttcttaatcaatatgttatttaccgtgacgaactaattgctcgtgtaatagataaaaatggtaacaatatgaaatacaagcatttgatcctgtctttaagcctgataatgctggggccattggctcatgcagaagagattggtagcgtcgacaccgtatttaaaatgatcggcccggatcacaaaattgttgtggaagcctttgatgatcccgatgtgaaaaatgtcacctgttatgtgagccgggcgaaaaccggtggtattaaagggggattgggtctggcggaagatacctccgatgcggccatttcttgtcagcaagtcgggccgattgaactgagcgatcgtattaaaaacggcaaagctcagggcgaggtagtattcaaaaaacgcacgtccctggtctttaagagcttacaggtcgtgcgcttttatgatgccaaacgcaacgcgctcgcttatctggcttactccgacaaagttgtagaaggtagcccgaaaaacgcgattagcgcggttcctgtcatgccgtggcggcaataacagaggcgatttatgcaacgggaaacggtctggttagtggaagatgagcaagggatagccgacacgctggtctacatgttgcagcaggaaggttttgccgtcgaggtctttgagcgaggcttgccggtgctggataaagctcgcaagcaggtacccgacgtcatgattctcgatgttggtctgccggatattagcggctttgaattgtgccgccagttactggcgctccatccggcgttacctgtactgttcctgacggcccgaagtgaagaggtcgatcgcctgcttgggctggaaattggtgctgacgactacgtggctaaaccgtttagtccccgcgaagtgtgcgccagggtgcgcaccttactgcgtcgggtgaagaagttcagcacgccgtctcccgtcatccgtattggacattttgaattgaatgaacccgcggcgcagatcagctggtttgacacgccattagcgctgactcggtatgagtttttattgttgaagacgttactcaagagtccgggccgcgtctggtcccgccagcaactgatggatagcgtatgggaagatgcgcaggacacctacgatcgcaccgtcgatacccacattaaaacgctgcgtgccaagctgcgcgccatcaaccccgatcttagtccgattaatactcatcgcggcatgggatatagcctgaggggcctgtaatgcgtatcggcatgcggttgttgctgggctattttttactggtggcggtggcagcctggttcgtactggccatttttgtcaaagaagttaaaccgggcgtgcgaagagcaacggaggggacgttgatcgacaccgcaacgttgctggcggagctggcgcgtcccgatttgctctctggggacccaacgcatgggcaactggcgcaggcgtttaatcagctacaacatcgcccgtttcgcgccaatatcggtggcattaacaaagtgcgcaatgaatatcatgtctatatgaccgatgcgcagggcaaagtattgttcgatagcgcaaataaagccgttggacaggattatagccgctggaatgacgtctggctaacgttgcgtggtcagtatggtgcgcgcagcacgttgcaaaatcctgccgatcccgaaagttctgtgatgtatgttgccgcaccgattatggacggcagccggcttattggcgttttgagcgtaggcaaaccgaacgcggcgatggctccggtcattaagcgtagcgagcggcgaattttatgggccagcgccattttgttggggattgcactggtgattggcgcaggcatggtttggtggatcaaccgctctattgcccggctcactcgctatgctgattccgtcactgacaataagcccgttcctctccccgatctcggtagtagcgagttgcgtaaactcgcgcaggcgctggaaagtatgcgcgtgaagctggaagggaaaaactatattgagcagtatgtttacgcattaactcatgagctaaaaagcccactggcggcgattcgtggagcggcggaaattttacgcgaaggtccgccgccggaagtggtggctcgttttactgacaacattctgacgcaaaatgcgcgtatgcaggcattggtagaaacgttactacgccaggcaagactggagaatcgtcaggaagtcgttctgactgctgttgatgtggcggcattattccgccgcgtcagcgaagcgcgcaccgtgcagttggcagaaaaaaaaatcactctgcatgttacgcccaccgaggttaacgttgctgctgaaccggcgttactggagcaggcgctgggaaatttactggataacgccatcgattttacccccgagagcggttgcatcacgctaagcgccgaagtggatcaggaacacgtcacgcttaaggtgctggataccggtagtggtattcctgactacgcgcttagtcgtatttttgaacgcttttactctttgcctcgtgcaaatgggcaaaaaagcagcggtctggggttggcgttcgtcagtgaggtcgcccgtttgtttaacggcgaagtcacgctgcgcaacgtgcaggaaggtggcgtgctggccagccttcgacttcaccgtcacttcacataacttcaaattcttcccacatagtcttcgtatcctgctgccattgcaaaggagaagactatgttgaaatcccccctgttctggaaaatgactagcctgtttggtgcagtattgctgttgttgattccgataatgctgattcggcaggtgattgtcgaacgtgctgattaccgtagcgatgtggaagatgcgattcgccaaagtaccagcgggccgcaaaaactcgttgggccgctcatcgctattcctgtgaccgagctttatacggtgcaggaagaggataaaaccgtggagcggaaacgaagttttatccatttttggttacctgagagtttgatggttgatggcaatcagaacgtggaagaacgcaagatagggatttataccggtcaggtctggcacagtgatttaacgttaaaagccgatttcgatgttagccgtcttagcgaactcaacgcgccaaatatcaccttaggcaagccatttattgtgattagcgtcggggatgcgcgtggtattggtgtggtgaaagcgcctgaagttaacggaacggcgctgaccattgaacccggcaccgggttagagcaaggcgggcagggcgtgcatatccctttacctgaaggggactggcggaagcagaacctgaagctgaatatggccctgaatttaagcggtaccggcgatctttctgtggtgcctggcgggcgtaatagcgaaatgaccttaaccagcaactggccgcatcccagttttttaggtgattttctaccagccaaacgggaagttagcgagagtggttttcaggcgcactggcaaagcagctggtttgctaataatctcggtgagcgttttgctagtggcaatgataccggctgggaaaacttcccggcgtttagcgtcgcagtaacgacgccagccgatcaataccaattaactgaccgggcgactaagtacgccattctgctgattgcactgacttttatggcgttctttgtttttgaaacgctcaccgcgcaacgtttacacccaatgcaatatttgctggtggggcttagtttggtgatgttttatttgctcttgctggcgctttctgaacataccggttttaccgtggcatggataatcgccagtctgattggggcgataatgaacggtatttatttgcaagcggtattgaaaggttggtgcaacagcatgttgtttaccctcgcgctgttgttgctggatggtgtgatgtggggactgctcaactctgccgatagcgcgctgttgttgggaaccagtgtgctggtggtggcgctggccggcatgatgtttgtgacccgtaatatcgactggtatgcgtttagtctgccgaaaatgaaagccagtaaagaagttacaacggacgatgagttacgtatctggaaataaggttgaaaaataaaaacggcgctaaaaagcgccgttttttttgacggtggtaaagccgattaatcttccagatcaccgcagaagcgataaccttcaccgtgaatggtggcgatgatttccggcgtatccggcgtagattcgaaatgtttacgaatacggcggatcgtcacgtctacagtacggtcgtgcggtttcagctcacggccggtcattttcttcagcagttcagcacgggactgaattttgcctgggttttcacagaagtgaagcatggcgcggaactcgctgcgcggcagcttgtactgctcgccatcagggccgatcaagctacggctgttgatgtccagttcccaaccattgaacttgtagctttcaacgctacgacgttcttcgctgacagtacccagattcatggtacgggacagtaggttgcgtgcacgaatcgtcagttcacgcgggttgaacggtttggtgatgtagtcatctgcaccgatttcgaggccgagaattttatcgacttcgttgtcacggccagtcaggaacatcaacgcaacattcgcctgctcgcgcagttcacgcgctaacagaagaccgttcttacccggcagattgatatccatgatcaccaggttgatgtcatattcagagaggatctgatgcatttccgcgccatctgtcgcttcgaaaacatcatagccttccgcttcgaaaatacttttcaacgtgttgcgtgttaccaactcgtcttcaacgataagaatgtgcggggtctgcatgtttgctacctaaattgccaactaaatcgaaacaggaagtacaaaagtccctgacctgcctgatgcatgctgcaaattaacatgatcggcgtaacatgactaaagtacgtaattgcgttcttgatgcactttccatcaacgtcaacaacatcattagcttggtcgtgggtactttccctcaggacccgacagtgagtaaaacggctgtcatcctaaccattttaacagcaacataacaggctaagaggggccggacacccaataaaactacgcttcgttgacatatatcaagttcaattgtagcacgttaacagtttgatgaaatcatcgtatctaaatgctagctttcgtcacattattttaataatccaactagttgcatcatacaactaataaacgtggtgaatccaattgtcgagatttattttttataaaattatcctaagtaaacagaaggatatgtagcattttttaacaactcaaccgttagtacagtcaggaaatagtttagccttttttaagctaagtaaagggctttttctgcgacttacgttaagaatttgtaaattcgcaccgcgtaataagttgacagtgatcacccggttcgcggttatttgatcaagaagagtggcaatatgcgtataacgattattctggtcgcacccgccagagcagaaaatattggggcagcggcgcgggcaatgaaaacgatggggtttagcgatctgcggattgtcgatagtcaggcacacctggagccagccacccgctgggtcgcacatggatctggtgatattattgataatattaaagttttcccgacattggctgaaagcttacacgatgtcgatttcactgtcgccaccactgcgcgcagtcgggcgaaatatcattactacgccacgccagttgaactggtgccgctgttagaggaaaaatctagttggatgagccatgccgcgctggtgtttggtcgcgaagattccgggttgactaacgaagagttagcgttggctgacgttcttactggtgtgccgatggtggcggattatcctagcctcaatctggggcaggcggtgatggtctattgctatcaattagcaacattaatacaacaaccggcgaaaagtgatgcaacggcagaccaacatcaactgcaagctttacgcgaacgagccatgacattgctgacgactctggcagtggcagatgacataaaactggtcgactggttacaacaacgcctggggcttttagagcaacgagacacggcaatgttgcaccgtttgctgcatgatattgaaaaaaatatcaccaaataaaaaacgccttagtaagtatttttc

SEQ ID NO: 7 - RNA, 77 nt, synthetic construct
  source 1..77: mol_type = other RNA
gcgcccgtagctcagctggatagagcgctgccctcgagaggcagaggtctcaggttcgaatcctgtcgggcgcgcca

SEQ ID NO: 8 - RNA, 77 nt, synthetic construct
  source 1..77: mol_type = other RNA
gcgcccgtagctcagctggatagagcgctgcccttgagaggcagaggtctcaggttcgaatcctgtcgggcgcgcca

SEQ ID NO: 9 - RNA, 75 nt, synthetic construct
  source 1..75: mol_type = other RNA
gtcctcttagttaaatggatataacgagcccctcgaaagggctaattgcaggttcgattcctgcaggggacacca

SEQ ID NO: 10 - RNA, 75 nt, synthetic construct
  source 1..75: mol_type = other RNA
gtcctcttagttaaatggatataacgagccccttgaaagggctaattgcaggttcgattcctgcaggggacacca

SEQ ID NO: 11 - RNA, 77 nt, synthetic construct
  source 1..77: mol_type = other RNA
aggcttgtagctcaggtggttagagcgcacccctcgaaagggtgaggtcggtggttcaagtccactcaggcctacca

SEQ ID NO: 12 - RNA, 77 nt, synthetic construct
  source 1..77: mol_type = other RNA
aggcttgtagctcaggtggttagagcgcaccccttgaaagggtgaggtcggtggttcaagtccactcaggcctacca

SEQ ID NO: 13 - RNA, 76 nt, synthetic construct
  source 1..76: mol_type = other RNA
gcccggatagctcagtcggtagagcaggggattcgaaatccccgtgtccttggttcgattccgagtccgggcacca

SEQ ID NO: 14 - RNA, 76 nt, synthetic construct
  source 1..76: mol_type = other RNA
gcccggatagctcagtcggtagagcaggggatttgaaatccccgtgtccttggttcgattccgagtccgggcacca

SEQ ID NO: 15 - RNA, 77 nt, synthetic construct
  source 1..77: mol_type = other RNA
ggagcggtagttcagtcggttagaatacctgcctcgaacgcagggggtcgcgggttcgagtcccgtccgttccgcca

SEQ ID NO: 16 - RNA, 77 nt, synthetic construct
  source 1..77: mol_type = other RNA
ggagcggtagttcagtcggttagaatacctgccttgaacgcagggggtcgcgggttcgagtcccgtccgttccgcca

SEQ ID NO: 17 - RNA, 76 nt, synthetic construct
  source 1..76: mol_type = other RNA
tcctctgtagttcagtcggtagaacggcggactcgaaatccgtatgtcactggttcgagtccagtcagaggagcca

SEQ ID NO: 18 - RNA, 76 nt, synthetic construct
  source 1..76: mol_type = other RNA
tcctctgtagttcagtcggtagaacggcggacttgaaatccgtatgtcactggttcgagtccagtcagaggagcca

SEQ ID NO: 19 - RNA, 76 nt, synthetic construct
  source 1..76: mol_type = other RNA
gtccccttcgtctagaggcccaggacaccgccctcgaacggcggtaacaggggttcgaatcccctaggggacgcca

SEQ ID NO: 20 - RNA, 76 nt, synthetic construct
  source 1..76: mol_type = other RNA
gtccccttcgtctagaggcccaggacaccgcccttgaacggcggtaacaggggttcgaatcccctaggggacgcca

SEQ ID NO: 21 - RNA, 77 nt, synthetic construct
  source 1..77: mol_type = other RNA
gcgttcatagctcagttggttagagcaccaccttcgaatggtgggggtcgttggttcgagtccaattgaacgcacca

SEQ ID NO: 22 - RNA, 77 nt, synthetic construct
  source 1..77: mol_type = other RNA
gcgttcatagctcagttggttagagcaccacctttgaatggtgggggtcgttggttcgagtccaattgaacgcacca

SEQ ID NO: 23 - RNA, 76 nt, synthetic construct
  source 1..76: mol_type = other RNA
gctgatatagctcagttggtagagcgcacccttcgaaagggtgaggtcggcagttcgaatctgcctatcagcacca

SEQ ID NO: 24 - RNA, 76 nt, synthetic construct
  source 1..76: mol_type = other RNA
gctgatatagctcagttggtagagcgcaccctttgaaagggtgaggtcggcagttcgaatctgcctatcagcacca

SEQ ID NO: 25 - RNA, 76 nt, synthetic construct
  source 1..76: mol_type = other RNA
gccgacttagctcagtaggtagagcaactgacttgaaatcagtaggtcaccagttcgattccggtagtcggcacca

SEQ ID NO: 26 - RNA, 76 nt, synthetic construct; identical to SEQ ID NO: 25
  source 1..76: mol_type = other RNA

SEQ ID NO: 27 - RNA, 74 nt, synthetic construct
  source 1..74: mol_type = other RNA
gcgggcgtagttcaatggtagaacgagagcttcgaaagctctatacgagggttcgattcccttcgcccgctcca

SEQ ID NO: 28 - RNA, 74 nt, synthetic construct
  source 1..74: mol_type = other RNA
gcgggcgtagttcaatggtagaacgagagctttgaaagctctatacgagggttcgattcccttcgcccgctcca

SEQ ID NO: 29 - RNA, 75 nt, synthetic construct
  source 1..75: mol_type = other RNA
gcgggcatcgtataatggctattacctcagcctcgaaagctgatgatgcgggttcgattcccgctgcccgctcca

SEQ ID NO: 30 - RNA, 75 nt, synthetic construct
  source 1..75: mol_type = other RNA
gcgggcatcgtataatggctattacctcagccttgaaagctgatgatgcgggttcgattcccgctgcccgctcca

SEQ ID NO: 31 - RNA, 75 nt, synthetic construct
  source 1..75: mol_type = other RNA
tggggtatcgccaagcggtaaggcaccggtttcgaataccggcattccctggttcgaatccaggtaccccagcca

SEQ ID NO: 32 - RNA, 75 nt, synthetic construct
  source 1..75: mol_type = other RNA
tggggtatcgccaagcggtaaggcaccggttttgaataccggcattccctggttcgaatccaggtaccccagcca

SEQ ID NO: 33 - RNA, 75 nt, synthetic construct
  source 1..75: mol_type = other RNA
tggggtatcgccaagcggtaaggcaccggattcgaattccggcattccgaggttcgaatcctcgtaccccagcca

SEQ ID NO: 34 - RNA, 75 nt, synthetic construct
  source 1..75: mol_type = other RNA
tggggtatcgccaagcggtaaggcaccggatttgaattccggcattccgaggttcgaatcctcgtaccccagcca

SEQ ID NO: 35 - RNA, 77 nt, synthetic construct
  source 1..77: mol_type = other RNA
cgcggggtggagcagcctggtagctcgtcgggctcgaaacccgaaggtcgtcggttcaaatccggcccccgcaacca

SEQ ID NO: 36 - RNA, 77 nt, synthetic construct
  source 1..77: mol_type = other RNA
cgcggggtggagcagcctggtagctcgtcgggcttgaaacccgaaggtcgtcggttcaaatccggcccccgcaacca

SEQ ID NO: 37 - RNA, 77 nt, synthetic construct
  source 1..77: mol_type = other RNA
cgcggggtggagcagcctggtagctcgtcgggctcgaaacccgaagatcgtcggttcaaatccggcccccgcaacca

SEQ ID NO: 38 - RNA, 77 nt, synthetic construct
  source 1..77: mol_type = other RNA
cgcggggtggagcagcctggtagctcgtcgggcttgaaacccgaagatcgtcggttcaaatccggcccccgcaacca

SEQ ID NO: 39 - RNA, 76 nt, synthetic construct
  source 1..76: mol_type = other RNA
gctgatatggctcagttggtagagcgcacccttcgaaagggtgaggtccccagttcgactctgggtatcagcacca

SEQ ID NO: 40 - RNA, 76 nt, synthetic construct
  source 1..76: mol_type = other RNA
gctgatatggctcagttggtagagcgcaccctttgaaagggtgaggtccccagttcgactctgggtatcagcacca

SEQ ID NO: 41 - RNA, 77 nt, synthetic construct
  source 1..77: mol_type = other RNA
gcgtccgtagctcagttggttagagcaccaccttcgaatggtgggggtcggtggttcgagtccactcggacgcacca

SEQ ID NO: 42 - RNA, 77 nt, synthetic construct
  source 1..77: mol_type = other RNA
gcgtccgtagctcagttggttagagcaccacctttgaatggtgggggtcggtggttcgagtccactcggacgcacca

SEQ ID NO: 43 - RNA, 77 nt, synthetic construct
  source 1..77: mol_type = other RNA
gcatccgtagctcagctggatagagtactcggctcgaaaccgagcggtcggaggttcgaatcctcccggatgcacca

SEQ ID NO: 44 - RNA, 77 nt, synthetic construct
  source 1..77: mol_type = other RNA
gcatccgtagctcagctggatagagtactcggcttgaaaccgagcggtcggaggttcgaatcctcccggatgcacca

SEQ ID NO: 45 - RNA, 77 nt, synthetic construct
  source 1..77: mol_type = other RNA
gcgcccttagctcagttggatagagcaacgacctcgaaagtcgtgggccgcaggttcgaatcctgcagggcgcgcca

SEQ ID NO: 46 - RNA, 77 nt, synthetic construct
  source 1..77: mol_type = other RNA
gcgcccttagctcagttggatagagcaacgaccttgaaagtcgtgggccgcaggttcgaatcctgcagggcgcgcca

SEQ ID NO: 47 - RNA, 74 nt, synthetic construct
  source 1..74: mol_type = other RNA
ggcgcgttaacaaagcggttatgtagcggattcgaaatccgtctagtccggttcgactccggaacgcgcctcca

SEQ ID NO: 48 - RNA, 74 nt, synthetic construct
  source 1..74: mol_type = other RNA
ggcgcgttaacaaagcggttatgtagcggatttgaaatccgtctagtccggttcgactccggaacgcgcctcca

SEQ ID NO: 49 - RNA, 77 nt, synthetic construct
  source 1..77: mol_type = other RNA
ggtggctatagctcagttggtagagccctggattcgaattccagttgtcgtgggttcgaatcccattagccacccca

SEQ ID NO: 50 - RNA, 77 nt, synthetic construct
  source 1..77: mol_type = other RNA
ggtggctatagctcagttggtagagccctggatttgaattccagttgtcgtgggttcgaatcccattagccacccca

SEQ ID NO: 51 - RNA, 76 nt, synthetic construct
  source 1..76: mol_type = other RNA
ggccccttagctcagtggttagagcaggcgactcgaaatcgcttggtcgctggttcaagtccagcaggggccacca

SEQ ID NO: 52 - RNA, 76 nt, synthetic construct
  source 1..76: mol_type = other RNA
ggccccttagctcagtggttagagcaggcgacttgaaatcgcttggtcgctggttcaagtccagcaggggccacca

SEQ ID NO: 53 - RNA, 76 nt, synthetic construct
  source 1..76: mol_type = other RNA
gggtcgttagctcagttggtagagcagttgactcgaaatcaattggtcgcaggttcgaatcctgcacgacccacca

SEQ ID NO: 54 - RNA, 76 nt, synthetic construct
  source 1..76: mol_type = other RNA
gggtcgttagctcagttggtagagcagttgacttgaaatcaattggtcgcaggttcgaatcctgcacgacccacca

SEQ ID NO: 55 - RNA, 77 nt, synthetic construct
  source 1..77: mol_type = other RNA
cggtgattggcgcagcctggtagcgcacttcgttcgagacgaaggggtcggaggttcgaatcctctatcaccgacca

SEQ ID NO: 56 - RNA, 77 nt, synthetic construct
  source 1..77: mol_type = other RNA
cggtgattggcgcagcctggtagcgcacttcgtttgagacgaaggggtcggaggttcgaatcctctatcaccgacca

SEQ ID NO: 57 - RNA, 77 nt, synthetic construct
  source 1..77: mol_type = other RNA
cggcacgtagcgcagcctggtagcgcaccgtcatcgagtgtcgggggtcggaggttcaaatcctctcgtgccgacca

SEQ ID NO: 58 - RNA, 77 nt, synthetic construct
  source 1..77: mol_type = other RNA
cggcacgtagcgcagcctggtagcgcaccgtcattgagtgtcgggggtcggaggttcaaatcctctcgtgccgacca

SEQ ID NO: 59 - RNA, 77 nt, synthetic construct
  source 1..77: mol_type = other RNA
cggcgagtagcgcagcttggtagcgcaactggttcgagaccagtgggtcggaggttcgaatcctctctcgccgacca

SEQ ID NO: 60 - RNA, 77 nt, synthetic construct
  source 1..77: mol_type = other RNA
cggcgagtagcgcagcttggtagcgcaactggtttgagaccagtgggtcggaggttcgaatcctctctcgccgacca

SEQ ID NO: 61 - RNA, 76 nt, synthetic construct
  source 1..76: mol_type = other RNA
aggggcgtagttcaattggtagagcaccggtctcgaaaaccgggtgttgggagttcgagtctctccgcccctgcca

SEQ ID NO: 62 - RNA, 76 nt, synthetic construct
  source 1..76: mol_type = other RNA
aggggcgtagttcaattggtagagcaccggtcttgaaaaccgggtgttgggagttcgagtctctccgcccctgcca

SEQ ID NO: 63 - RNA, 85 nt, synthetic construct
  source 1..85: mol_type = other RNA
ggtggggttcccgagcggccaaagggagcagactcgaaatctgccgtcatcgacttcgaaggttcgaatccttcccccaccacca

SEQ ID NO: 64 - RNA, 85 nt, synthetic construct
  source 1..85: mol_type = other RNA
ggtggggttcccgagcggccaaagggagcagacttgaaatctgccgtcatcgacttcgaaggttcgaatccttcccccaccacca

SEQ ID NO: 65 - RNA, 76 nt, synthetic construct
  source 1..76: mol_type = other RNA
ggggctatagctcagctgggagagcgcctgcttcgaacgcaggaggtctgcggttcgatcccgcatagctccacca

SEQ ID NO: 66 - RNA, 76 nt, synthetic construct
  source 1..76: mol_type = other RNA
ggggctatagctcagctgggagagcgcctgctttgaacgcaggaggtctgcggttcgatcccgcatagctccacca

SEQ ID NO: 67 - RNA, 87 nt, synthetic construct
  source 1..87: mol_type = other RNA
gcgaaggtggcggaattggtagacgcgctagcttcgagtgttagtgtccttacggacgtgggggttcaagtcccccccctcgcacca

SEQ ID NO: 68 - RNA, 87 nt, synthetic construct
  source 1..87: mol_type = other RNA
gcgaaggtggcggaattggtagacgcgctagctttgagtgttagtgtccttacggacgtgggggttcaagtcccccccctcgcacca

SEQ ID NO: 69 - RNA, 88 nt, Escherichia coli
  source 1..88: mol_type = tRNA
ggaagtgtggccgagcggttgaaggcaccggtcttgaaaaccggcgacccgaaagggttccagagttcgaatctctgcgcttccgcca

SEQ ID NO: 70 - RNA, 90 nt, Tequatrovirus sp.
  source 1..90: mol_type = tRNA
ggaggcgtggcagagtggtttaatgcaccggtcttgaaaaccggcagtcgctccggcgactcataggttcaaatcctatcgcctccgcca
